(19) United States
(12) Patent Application Publication
(10) Pub. No.: US 2002/0177551 A1
(43) Pub. Date: Nov. 28, 2002

(54) Compositions and methods for treatment of neoplastic disease

(76) Inventor: David S. Terman, Pebble Beach, CA (US)

Correspondence Address: David S. Terman, P.O. Box 987, Pebble Beach, CA, 93953, US

(21) Appl. No.: 09/870,759

(22) Filed: May 30, 2001

Related U.S. Application Data
(60) Provisional application No. 60/208,128, filed on May 31, 2000.

(51) Int. Cl. A61K 38/17; C12N 5/06; C07K 14/705

(52) U.S. Cl. 514/12; 435/325; 530/350

(57) ABSTRACT

The present invention comprises compositions and methods for treating a tumor or neoplastic disease in a host, The methods employ conjugates comprising superantigen polypeptides, nucleic acids with other structures that preferentially bind to tumor cells and are capable of inducing apoptosis. Also provided are superantigen-glycolipid conjugates and vesicles that are loaded onto antigen presenting cells to activate both T cells and NKT cells. Cell-based vaccines comprise tumor cells engineered to express a superantigen along with glycolipids products which, when expressed, render the cells capable of eliciting an effective anti-tumor immune response in a mammal into which these cells are introduced. Included among these compositions are tumor cells, hybrid cells of tumor cells and accessory cells, preferably dendritic cells. Also provided are tumoricidal T cells and NKT cells devoid of inhitory receptors or inhibitory signaling motifs which are hyperresponsive to the the above compositions and lipid-based tumor associated antigens that can be administered for adoptive immunotherapy of cancer and infectious diseases.

### BACKGROUND OF THE INVENTION

[0001] 1. Field of the Invention

[0002] The invention relates generally to immunotherapeutic compositions and methods for treating tumors and cancer. The methods are based on the expression of superantigen (“SAg”) alone or in combination with other molecules in transfected host cells (tumor cells, accessory cells or lymphocytes). Other therapeutic methods are based on administering T cells which are activated by cells engineered to express SAg and other immunostimulatory molecules and structures.

[0003] 2. Description of the Background Art

[0004] Therapy of the neoplastic diseases has largely involved the use of chemotherapeutic agents, radiation, and surgery. However, results with these measures, while beneficial in some tumors, has had only marginal effects in many patients and little or no effect in many others, while demonstrating unacceptable toxicity. Hence, there has been a quest for newer modalities to treat neoplastic diseases.

[0005] In 1980, tumoricidal effects were demonstrated in four of five patients with advanced breast cancer treated with autologous plasma that had been perfused over columns in which Staphylococcal Protein A was chemically attached to a solid surface (Terman et al., New Eng. J. Med., 305:1195 (1981)). While the initial observations of tumor killing effects with the immobilized Protein A perfusion system have been confirmed, some have obtained inconsistent results.

[0006] The explanation of these inconsistencies appears to be as follows. First, commercial Protein A is an impure preparation, as evident from polyacrylamide gel electrophoresis and radioimmunoassays that detected Staphylococcal enterotoxins in the preparations.

[0007] Second, various methods of immobilizing Protein A to solid supports have been used, sometimes resulting in loss of biological activity of the perfusion system. Third, the plasma used for perfusion over immobilized Protein A has often been stored and treated in different ways, also resulting in occasional inactivation of the system. Moreover, the substance(s) or factors responsible for the anti-tumor effect of this extremely complex perfusion system have not been previously defined.

[0008] The system contained an enormous number of biologically active materials, including the Protein A itself, Staphylococcal proteases, nucleases, exotoxins, enterotoxins and leukocidin, as well as the solid support and coating materials. In addition, several anaphylatoxins were generated in plasma after contact with immobilized Protein A. Finally, it was speculated that the biological activity of the system was due to the removal from the plasma by the Protein A of immunosuppressive immune complexes that otherwise inhibit the patient's antitumor immune response.

[0009] The Staphylococcal enterotoxins that contaminate the Protein A columns are a family of extracellular products of Staphylococcal aureus that belong to a well recognized group of proteins that have common physical and chemical properties. The enterotoxins produce a number of characteristic effects in humans and animals, such as emesis, hypotension, fever, chills, and shock in primates and enhancement of gram negative endotoxic lethality in rabbits. At least some of these effects are due to the ability of these proteins to act as extremely potent T cell mitogens.

[0010] Staphylococcal enterotoxins are representative of a family of molecules known as SAgs which are the most powerful T cell mitogens known. They are capable of activating 5 to 30% or the total T cell population compared to 0.01% for conventional antigens. Moreover, the enterotoxins elicit strong polyclonal proliferation at concentrations 10³-fold lower than conventional T cell mitogens. The most potent enterotoxin, Staphylococcal enterotoxin A (SEA), has been shown to stimulate DNA synthesis in human T cells at comprises residues 31-116 and domain II of residues 117-233 together with the amino tail 1-30. In addition, the biologically active regions of the proteins are conserved and show a high degree of homology. One region of striking amino acid sequence homology between SEA, SEB, SEC, SED, and SEE is located immediately downstream (toward the carboxy terminus) from the cysteine located at residue 10⁶ in SEA. This region is thought to be responsible for T cell activation. A second homologous region that begins at residue 147 and extends downstream is highly conserved. This region is believed to mediate emetic activity. The region related to emetic activity can be omitted from enterotoxins used as therapeutics.

[0011] A sequence analysis of the Staphylococcal enterotoxins with other toxins has revealed SEA, SEB, SEC, SED, Staphylococcal toxic shock-associated toxin (TSST-1 also known as SEF), and the Streptococcal exotoxins share considerable nucleic acid and amino acid sequence homology. The enterotoxins belong to a common generic group of proteins thought to be evolutionarily related.

[0012] Enterotoxins bind to MHC Class II molecules and the T cell receptor (“TCR”) in a manner quite distinct from conventional antigens. Enterotoxins engage the variable region of the TCR β chain on an exposed face of the β pleated sheet and the sides of the MHC Class II molecule, rather than engaging the groove of the Class II molecule like conventional antigens. In contrast to SEB and the SEC, which have only the capacity to bind to the MHC class II α chain, SEA, as well as SEE and SED, also interacts with the MHC class II β chain in a zinc dependent manner T cell recognition is based on the presence of the β chain and is therefore independent of other TCR components and diversity elements. Single amino acid positions and regions important for SAg-TCR interactions have been defined. These residues are located in the vicinity of the shallow cavity formed between the two domains. The alanine substitution of amino acid residue Asn23 in SEB has demonstrated the importance of this residue in SEB/TCR interaction. This particular residue is conserved among all of the Staphylococcal enterotoxins and may constitute a common anchor position for enterotoxin interaction with TCR Vβ chains. Amino acid residues in positions 60-64 have also been shown to contribute to the TCR interaction as do the cysteine residues forming the intermolecular disulfide bridge of SEA. For SEC2 and SEC3, the key points of interaction in the Vβ chain are located in the CDR1, CDR2 and HRV4 TCR Vβ-3 chain. Hence, multiple and highly variable parts of the Vβ chain contribute to the formation of the enterotoxin binding site on the TCR. Thus far, a single and linear consensus motif in the TCR Vβ displaying a high affinity interaction with particular enterotoxins has not been identified. A significant contribution of the TCRα chain in enterotoxin-TCR recognition is acknowledged as well as MHC class II isotypes. This distinctive binding mechanism of enterotoxins which bypasses the highly variable parts of the MHC class II and TCR molecules allows them to activate a high frequency or T cells with massive lymphoproliferation, cytokine induction and cytotoxic T cell generation. These properties are shared by other proteins made by infectious agents. Together, these proteins form a well recognized group known as SAgs.

[0013] There are two general classes of SAgs. The first includes minor lymphocyte stimulating (MLS) antigens. The second class of SAgs includes mycoplasmal, viral, and bacterial proteins such as the Staphylococcal enterotoxins and Streptococcal exotoxins. All SAgs have the following properties. T cell activation does not require antigen processing. There is no MHC restriction of responding T cells. SAgs bind to and evoke responses from all T cells expressing Vβ receptors, without requiring other TCR or diversity elements. CD4-CD8-α/β+T cells and γ/δT cells are also capable of responding to SAgs. The SAgs induce a biochemically distinct T cell activation pathway. Thus, SAgs interact with and activate a much larger proportion of T cells than conventional antigens, causing massive lymphoproliferation, cytotoxic T cell generation, and cytokine secretion. A given SAg can activate up to 30% of resting T cells compared to 0.01% for conventional antigens. As highly representative members of this family of SAgs, the enterotoxins share these characteristics.

[0014] The present invention features the use of SAgs in association with molecules to produce tumor killing effects. The SAgs are useful in peptide form and may combine with another peptide or nucleic acid to form a conjugate. The effect of the combined molecules is synergistic. These conjugates are useful when administered as a preventative or therapeutic antitumor vaccine in tumor bearing patients. Alternatively, they may be used ex vivo to load an antigen presenting cell as a means of immunizing a T, NK or NKT cell population for use in adoptive therapy of cancer. Examples of such conjugates are complexes between: SAg and glycosylceramide; SAg and apolipoproteins (Lp(a)), SAg and oxyLDL, SAg and verotoxins, SAg and GPI-ceramide (with phytosphingosine backbone), SAg and lipopolysaccharide (LPS), SAg and peptidoglycan, SAg and mannan proteoglycan, SAg and muramic acid, SAg and phytosphingolipid, SAg and tumor peptides. Also intended are SAg and Gal conjugates and glycosylated SAgs.

[0015] The present invention features the use of SAg in association or conjugated to oxidized low density lipoproteins (oxyLDL) and apolipoproteins (e.g., lipoprotein (a) (Lp(a)). OxyLDL and its byproducts bind to receptors on sinusoidal endothelial cells in the tumor microcirculation where they induce apoptosis, increase levels of tissue factor and activated thrombin, upregulate achesion molecules and produce a prothrombotic state. Lp(a) is densely deposited in tumor microcirculation and as a competitive inhibitor of plasminogen is prothrombotic. Hence, both apolipoproteins and oxyLDL not only home to receptors on the tumor microcirculation but they also induce endothelial cell or macrophage apoptosis as well as a prothrombotic state. These local effects are amplified by the presence of the conjugated superantigen which induce a localized T cell immune and inflammatory response collectively resulting in a potent anti-tumor response.

[0016] The present invention also features the use of the SAg in association or conjugated to verotoxins. The latter molecules have the capacity to bind to galactosylceramide receptors on tumor cells and induce apoptosis. Hence, the tumor targeting and apoptosis inducing functions of the verotoxin are coupled with the T cell immune and inflammatory response induced by the SAgs to produce a potent and well localized anti-tumor response.

[0017] The present invention features the use of SAgs in association or conjugated to mono or digalactosylceramides. The latter have been isolated from human kidney, Fabry's disease kidney, marine sponge Aegelus mauritanius and is expressed in certain bacteria such as Sphingomonas paucimobilis. They have been shown to activate NKT cells and to induce anti-tumor effects in vivo against several types of tumors. The activation of NKT cells in the presence of the mono and digalactosylceramides appears to be IL-12 dependent. The biological activity of the -galactosylceramides is observed in both mono and digalactosylceramide forms and is dependent upon the presence of an anomeric configuration on the terminal galactose. The lengths of the sphingosine base and fatty acyl chains of 23 and 15 respectively also appear to be optimal for production of the anti-tumor effects. SAg is also used in association with phyosphinosine which is expressed in Saccharomyces cervevisiae membranes and vesicles.

[0018] SAgs are known to be the most powerful T cell mitogens known and have been shown to produce anti-tumor effects in several animal models. The -galactosylceramides are known to be potent inducers of NKT cell activation which have been shown to produce an anti-tumor effect in an IL-12 dependent manner. In the present invention SAgs are combined with -galactosylceramides biochemically as conjugates and genetically within a cell which expresses the newly synthesized protein-bound galactosylceramide on the cell surface. The newly synthesized conjugates in native form or expressed in or on the cell produce a synergistic anti-tumor effect due to the activation of T cells and NKT cell populations.

[0019] Furthermore, in the present invention the SAg-galactosylceramides are expressed in tumor cells, dendritic cells (“DC”) or a hybrid cell made by fusing a tumor cell and a DC. The use of DCs or DC/tumor cell hybrids (DC/tc) to present the SAg-galactosylceramides fusion constructs or conjugates provides the optimal costimulation for activation of a tumor specific T cell population. The use of a tumor cell or a DC/tc provides in addition to costimulation, expression of the tumor antigen itself to activate anti-tumor T and NKT cell clones which are tumor specific. Hence, an optimal cell is a DC/tc which expresses SAg and SAg-anomeric galactosylceramides.

[0020] The SAg-galactosylceramide conjugates are useful in the present invention. However, there are distinct differences and advantages to producing and expressing the SAg-α-galactosylceramide conjugates within a cell. First, final products are quite different. One involves the enterotoxin-α-galactosylceramide in free form whereas the other involves cell associated enterotoxin-α-galactosylceramide which includes enterotoxin nucleic acids and peptides. In the cell both enterotoxins and α-galactosylceramides are associated with numerous intracellular and membrane structures such as MHC, costimulatory and adhesion molecules, heat shock proteins, membrane glycolipids and glycosphingolipids which may improve immunogenicity and antigen presentation. They may also be transported in various vesicles and exosomes which may provide additional immunogenicity. With the addition of appropriate signals sequences and association with molecules involved in the antigen presenting pathways such as the invariant chain, TAP and LAMP molecules, the conjugates may be routed in the cell to the MHC class I, class II or CD1 receptor. Therefore, enterotoxin and α-galactosylceramides produced within a cell are presented to the host's immune system in an entirely different form compared to the purified enterotoxin polypeptide.

[0021] Unlike free enterotoxin polypeptide or -galactosylceramide, SAg transfected tumor cells, DCs or DC/tc present enterotoxins to the T cell system in association and or conjugated to tumor associated antigens including mutated normal structures or fusion structures, costimulatory and adhesion molecules. Indeed, the coadministration of SAg with tumor antigen would be expected to produce a heightened response to the tumor antigens while preventing the clonal deletion which occurs with SAg alone. Liu et al., Proc. Natl. Acad. Sci., 88: 8705-8709, (1991); McCormack et al., Proc. Natl. Acad. Sci., 91: 2086-2090, (1994); Coppola et al., Int. Immunol., 9: 1393-403, (1997). Hence, the coadministration of SAg-galactosylceramide and tumor associated antigens would induce a predictably heightened tumor specific response by the host. This prediction was borne out by the Applicant's work showing that SAg transfection of tumor cells abolished the tumorigenicity of 4T1 mammary carcinoma cells, significantly reduced the number of established metastases and prolonged survival compared to untreated controls. (Pulaski, Terman, et al., American Association of Cancer Research, April 1999; Cancer Research in press 2000).

[0022] SAg transfected tumor cells in vivo are effective in an additional manner which does not apply to SAg polypeptide. Ingestion of apoptotic cells by DCs augments the immunogenicity of tumor cells. Fields et al., Proc. Natl. Acad Sci., 95: 9882-9887, (1998); Albert et al., Nature, 392: 86-89, (1998). DCs are acknowledged as the premier accessory cell for antigen presentation. They have been shown to ingest apoptotic cells and nucleic acids and process them for presentation to host T cells in the context of costimulation, adhesion and MHC molecules. Akbari et al., J. Exp. Med., 189: 169-177, (1999). Therefore, following apoptosis of SAg transfected tumor cells and ingestion by DCs, SAg-encoding nucleic acid as well as tumor associated nucleic acids in the transfected cells would produce additional anti-tumor responses. Purified polypeptide enterotoxins do not share with the SAg transfectants this property of enhanced immunogenicity following ingestion and processing by DCs.

[0023] There are enormous structural and functional differences between the polypeptide enterotoxin and SAg-transfected tumor cells. The starting materials are different i.e. peptides vs nucleic acids and the product is different i.e. polypeptide vs enterotoxin transfected cell in which the SAg is may exist in nucleic acid and peptide form associated with a vast number of intracellular and membrane structures. Some of these structures may actually improve the T cell activating function of SAgs such as deoxyribonucleic acids, ribonucleic acids, tumor associated antigens, heat shock proteins, costimulatory molecules and adhesion molecules and endosomes. Cellular SAg peptides or nucleotides exist in association with tumor associated antigens, costimulants, adhesion molecules, heat shock proteins and MHC molecules, GPI-ceramides or SAg receptors (digalactosylceramides) which improve the immunogenicity of the tumor antigens. Therefore, these structural and functional differences between the polypeptide SAg and the enterotoxin transfected tumor cells clearly show that SAg transfected tumor cells have a far greater potential than the polypeptide to induce a tumor specific response.

[0024] Moreover, SAg transfected tumor cells possess an additional unique property not shared by the polypeptide SAg. SAg-transfected tumor cells display the metastatic phenotype of the tumor cells which enables them to colonize and traffic to metastatic sites in vivo. Once localized to micrometastatic sites the transfectants expressing SAg induce a potent tumor specific T cell response. In contrast, the purified polypeptide SAg unassociated with a tumor cell would have no capacity whatsoever to colonize metastatic sites.

[0025] The present invention also provides SAg-encoding nucleic acid, preferably DNA, fused with (or cotransfected with) a nucleic acid encoding another molecule. The transfected cells include tumor cells, accessory cells e.g., DCs, tumor cell/accessory cell (e.g., DC) hybrids. The expression of molecules in addition to enterotoxins by these cells serves the following functions:

[0026] 1) enhance the immunogenicity of the SAg transfected cell by providing nucleic acids encoding an additional potent immunogen. Examples would include tumor associated antigens or mutated normal antigen or fusion peptides in tumor cells, an immunogenic bacterial product such as Staphylococcal adhesin protein A, LPS, β-glucans, and peptidoglycans, costimulatory and adhesion molecules, heat shock protein, growth factor receptors such as Her/neu and tumor markers such as PSA.

[0027] 2) assist in tumor killing activity by the SAg transfected cell when localized to tumor sites, by providing nucleic acids encoding the following: angiogenesis antagonists, chemoattractants such as C5a, chemokines such as RANTES, hyaluronidase and coagulase and CD44 isoforms.

[0028] 3) increase the binding of immunogenic substances to the surface of the SAg transfected cell by providing nucleic acids encoding the following: CD1 receptors, CD14 receptors, SAg receptors

[0029] 4) increase the production of SAg in the SAg transfected cell by providing nucleic acids encoding the following: cell cycle proteins, amplified oncogenes, and signal transduction molecules.

[0030] 5) assist in trafficking of SAg to class I or class II pathway in the SAg transfected cell by providing nucleic acid encoding the following: the invariant chain, the LAMP1 proteins and TAP proteins.

[0031] 6) induction of a local tumoricidal response by intratumoral injection of nucleic acids encoding the following: oxyLDL receptor and SAg receptor, chemoattractants, chemokines.

[0032] The present invention also provides for augmented tumoricidal responses by immunocytes particularly T, NK, and NKT cells. Inhibitory receptors or their tyrosine-based inhibitory motifs on T, NK, and NKT cells with specificity for lipid-based tumor associated antigens (LBTAAs) are deleted or functionally deactivated (antisense or gene knockout) which permits unopposed intacellular signaling by the activation receptors and enhanced responsiveness to LBTAAs and their respective tumors of origin. Inhibition of inhibitory receptor phosphorylases (SHP or SHIP) and/or ITIM binding sites on activation receptors (ITAM) is also contemplated as a means of augmenting the host response to LBTAAs.

### SUMMARY OF THE INVENTION

[0033] The present invention comprises a method for treating cancer in a host comprising providing conjugates, fusion proteins or naked nucleic acids of superantigen and addtional molecule(s) which produce an tumoricidal response. The addtional molecule serves the following functions: 1) to target a receptor (digalactosylceramide) expressed on tumor cells in vivo and induce tumor cell apoptosis e.g., SAg-verotoxin conjugates. 2) to target receptors expressed on tumor sinusoidal endothelium, induce apoptosis and a prothrombotic state e.g. SAg-oxyLDL conjugates and SAg-Lp(a) conjugates 3) to activate a dormant population of tumoricidal NKT cells e.g. SAg-digalactosylceramides, SAg-GPI-digalactosylceramide (phytosphingosine) complexes. 4) target receptors for integrins expressed on tumor microvasculature e.g., SAg-RGD conjugates. 5) naked DNA administered intratumorally induces tumor cell expresson in vivo of receptors for ligands which produce apoptosis and inflammation e.g, naked DNA SAg-oxyLDL receptor, SAg-LOX-1 receptor, SAg-SREC receptor.

[0034] Sickled erythrocytes are useful in the present invention since they have natural ligands for integrins expressed on tumor neovasculature which facilitates their targeting to the tumor endothelium. Sickled erythrocyte membranes acquire oxyLDL using fusigenic techniques with oxyLDL containing liposomes and apoproteins via gene transfection in the nucleated pre-reticulocyte phase. The oxyLDL and apoproteins expressed by the sickled cells facilitates targeting to oxyLDL, LOX-1 and SREC receptors present on the tumor microvasculature. These erythrocytes are also useful for carrying nucleic acids for transfection of the tumor endothelial cells in vivo. Vesicles derived from sickled erythrocytes are more rigid, prothrombotic and target the tumor microvascularture more effectively than the parent cell. They also carry oxyLDL to receptors on tumor endothelium. Likewise, vesicles, exosomes or SAg-GPI-digalctosylceramides shed from from SAg transfected tumor cells are capable of inducing potent tumoricidal responses and are useful in the present invention.

[0035] In addition, bacterial and yeast expression and phage display systems are useful for the presentation of SAg in association with other anti-tumor molecules. The yeast sec mutant or yeast display is used to produce a SAg-ceramide conjugate exhibiting a phytosphingosine in the sphingosine portion of the ceramide. This structure activates both T cell, NK cell and NKT cells. Sphingomonas paucimobilis which naturally expresses a α-galactosylceramide is transfected with SAg nucleic acids which results in the shedding of SAg-α-galactosylceramide complexes which are use to produce a population of tumoricial T cells, NK cells and NKT cells. SAg phage displays with tumor localizing molecules e.g. RGD sequences are used to target SAgs to tumor microvasulature. SAg phage displays with similar tumor localizing molecules comprising tumor or tumor endothelial cell apoptosis inducing agents e.g., thrombospondin or oxyLDL are use to increase the tumoricidal response.

[0036] The present invention comprises a method for treating cancer in a host comprising providing cells transfected with a gene that express and/or secretes a SAg or T cells activated by the transfected cells to the host. The cells are transfected in vivo or in vitro. SAgs may activate T cells or NKT cells in the host. These same transfectants may be used to stimulate a population of T cells or NKT cells ex vivo which are provided to the host as tumor specific effector cells in adoptive immunotherapy. The transfected cells may be, for example, tumor cells accessory cells, DCs muscle cells, immunocytes, fibroblasts. When transfected in vitro the cells can be xenogeneic to the host, from the same species as the host or host cells.

[0037] For in vivo immunization, tumor cells are transfected with nucleic acids encoding SAgs together with a carbohydrate modifying enzyme such as α-galactosyl transferase to produce the α-Gal epitope, Staphylococcal hyaluronidase, Streptococcal capsular polysaccharide, Staphylococcal erythrogenic toxin, Staphylococcal Protein A, Staphylococcal βhemolysin, Staphylococcal coagulase, costimulants such as B7-1 and B7-2, chemoattractants and chemokines. SAgs are also cotransfected into tumor cells with gene clusters encoding the biosynthesis of highly immunogenic microbial Lipid A, membrane or capsular polysaccharides, lipoproteins and peptidoglycans. Nucleic acids are useful when transfected alone. However combinations are preferred. The cotransfection into tumor cells of the SAg-encoding nucleic acid together with the nucleic acids encoding αGal or GalCer biosynthesis is particularly useful. The cotransfection into tumor cells of the nucleic acid encoding SAg with nucleic acids encoding Staphylococcal erythrogenic toxins and hyaluronidase allows the transfected tumor cells to simulate the in vivo inflammatory activity of a Staphylococcus or leukocyte or macrophage by secreting enzymes and toxins which induce a sterile cellulitis in tumor sites.

[0038] Further provided are tumor cells transfected with nucleic acid encoding structures such as the erb/Neu gene which upon administration to the host promotes tumor cell trafficking and colonization of micrometastatic sites. Amplified oncogenes linked to SAg nucleic acids provide the locus and energy for expression or overexpression of both gene products. Thus, provided herein are tumor cells transfected with SAg-encoding nucleic acid together with nucleic acid encoding other oncogenes, amplified oncogenes and transcription factors, angiogenic factors such as angiostatin, angiogenesis receptors such as VEGF, tumor growth factors, tumor suppressors, cell cycle proteins and key proteins engaged in the antigen routing and processing pathway. In one example, the microbial SAg and erb/Neu nucleic acids are cotransfected into tumor cells. These nucleic acids may also linked to an inducible gene such as that encoding metallothionein or corticosteroid receptors. In this way, the cells are activated by exogenous delivery of corticosteroids or a heavy metal only after a suitable period of time has lapsed to allow them to localize in metastatic sites in vivo.

[0039] Tumor cell transfectants are also useful ex vivo to immunize a T cell or NKT cell population producing tumor specific effector cell population for adoptive immunotherapy of cancer. These immunizing tumor cells are transfected with nucleic acids encoding SAgs and the SAg receptor. The latter transfectants are capable of binding exogenous SAg for presentation to a T cell population. In addition, tumor cells are transfected with nucleic acids encoding CD1 receptors which are capable of binding exogenous glycosylceramides and lipoarabinans free or bound to SAgs for presentations to T or NKT cells. Similarly, tumor cells are transfected with nucleic acids encoding the CD 14 receptor which bind exogenous peptidoglycans and LPS's, free or bound to SAgs for presentation to T cells.

[0040] Likewise, the nucleic acids encoding the mannose receptor are transfected into tumor cells which are capable of binding a broad range of glycosylated SAgs for presentation to T cells. The present invention provides detailed methods for preparation of the SAg-glycosylceramide, SAg-LPS, SAg-peptidoglycan complexes as well as glycosylated SAgs which are loaded onto their respective receptors expressed on tumor cells, accessory cells and, in some instances, immunocytes. For ex vivo use, any prokaryotic or eukaryotic cell may be used which is transfectable with nucleic acid encoding SAgs to provide surface expression of the SAg or constructs expressed on tumor, accessory cell or immunocyte transfectants. When the transfected cells are not host tumor cells, the cells additionally express a tumor associated antigen expected to be present on the host's cancer cells.

[0041] Also provided is a tumor specific T cell, NK or NKT cell (collectively immunocyte) population which is activated by SAgs, SAgs conjugates given above or the tumor cell transfectants given above to produce a population of tumor specific effector cells useful in adoptive immunotherapy. A particularly effective method of producing a hyperresponsive immunocyte population is to delete (e.g. gene knockout) or inactivate (e.g. antisense) receptors on immunocytes or their respective immune receptor tyrosine-based inhibitory motifs (ITIMS) which inhibit cellular activation by receptors specific for lipid-based tumor associated (Lip-TAAs) and/or superantigens. After exposure to Lip-TAAs and/or superantigens, the immunocyte activation receptor response is unopposed by an inhibitory signal in which case immunocytes readily differentiate into tumor specific effector cells which are highly reactive even to weak Lip-TAAs.

[0042] After ex vivo stimulation, the T cells or NKT cells used for adoptive immunotherapy should preferentially express CD44 which indicates that they are capable of trafficking and homing to tumor sites. Additionally, the T cell population used for ex vivo immunization is engineered to overexpress the TCR variable Vβ and invariant V α sites specific for SAg and glycosylceramide binding respectively and to produce IFN by exogenous delivery of corticosteroids or a heavy metal. A particularly useful population of therapeutic tumor specific effector T cells or NKT cells which demonstrates overexpressed CD44 together with Vb variable and Va invariant regions and high IFN production. Also provided are methods for reactivating anergic T cells in cancer patients by transfecting nucleic acids encoding the SAg receptors to produce a T cell population which may now be stimulated with exogenous SAgs.

[0043] Compositions which mimic SAgs are used in place of native SAgs for in vivo administration in order to circumvent the problem of naturally occurring SAg-specific antibodies. The SAg mimics are largely comprised of nucleotides or oligonucleotide-peptide chimeric constructs which are specific for tumor cells expressing SAg receptors (via the nucleotide) while retaining their SAg specificity for the TCR (via the peptide). The class II binding site of the SAg may optionally be eliminated or mutated to minimize SAg peptide binding to MHC class II receptors in vivo. The molecule may be composed entirely of nucleotides for which there are no naturally occurring antibodies. In addition, carriers are provided for in vivo transfection of tumors by nucleic acids encoding SAgs or other nucleic acid constructs given in Table I. Phage displayed tumor neovasculature ligands may also carry nucleic acids encoding SAgs or other constructs.

[0044] The constructs and method are used to treat any solid tumor such as carcinoma, melanoma and sarcoma or cancer of hemopoietic origin, such as lymphomas and leukemias which may or may not form solid tumors.

[0045] Unless otherwise defined, all technical and scientific terms used herein have the same meaning as commonly understood by one of ordinary skill in the art of this invention. Although methods and materials similar or equivalent to those described herein can be used in the practice or testing of the present invention, suitable methods and materials are described below. All publications, patent applications, patents, and other references mentioned herein are incorporated by reference in their entirety. In case of conflict, the present specification, including definitions, will control. In addition, the materials, methods, and examples are illustrative only and not intended to be limiting. Other features and advantages of the invention will be apparent from the following detailed description and from the claims.

### BRIEF DESCRIPTION OF THE DRAWINGS

[0046] FIG. 1. Schematic diagram of the cloning of the SEB gene into the pHb Apr1-neo vector. The coding region of the SEB gene was amplified with PCR primers. The upstream primer (SEB1) has a SalI site at its 5′ end and the downstream primer (SEB2), a BamHI site. Both the pHb Apr1-neo vector and the amplified SEB insert were digested with SalI and BamHI, ligated and transformed into XL1-Blue competent cells. The final construct was verified by restriction enzyme and sequence analyses.

[0047] FIG. 2. Cloning of the SEB gene into the pHb-Apr1 neo vector. Clones 1-5 contained the SEB insert (coding region 801 bp) and the pHb-Apr1 neo vector (10 kb). All DNA was digested with SalI and BamHI and electrophoresed on a 1% agarose gel in 1×TAE buffer.

[0048] FIG. 3. Alignment of the published SEB coding sequence (SEQ ID NO:1) and the newly constructed SEB gene (SEQ ID NO:2) in pHβ-Apr1 neo vector (Clone #2). Clone #2 was sequenced with 4 primers: SEB1, 2, 3, and 4. SEB1 and 2 (SEQ ID NOS:3-4) are the PCR primers that were used for the amplification of the SEB gene. SEB 3 (SEQ ID NO:5) (TATGAAAGTTTTGTATGATGAT) and SEB 4 (SEQ ID NO:6) (AGTGACGAGTTAGGTAATCT) are internal primers. The final sequence was confirmed by the multiple overlapping of sequences and aligned with the published SEB sequence. It is a perfect match. The start codon (ATG) and the stop codon (TGA) are underlined. The upstream and the downstream sequences are the human b-actin promoter and the SV40 polyA sequences in the pHb-Apr1 neo vector with the addition of SalI and BamHI restriction enzyme sites.

TABLE I
Therapeutic Constructs And Preferred Conditions Of Use

I. CELLS: Tumor Cells, DCs or DC/Tumor Cell Hybrids (DC/tc)
USE: In vivo and Ex vivo
PURPOSE

| | |
|---|---|
| A. | In Vivo Preventative or Therapeutic Vaccine (Established Tumor) |
| | Accomplish by transfecting or co-transfecting with nucleic acid encoding superantigen |
| | plus one or more of the following: |
| 1. | Superantigens |
| 2. | Enzyme that modifies carbohydrate to induce Gal or GalCer epitope expression |
| 3. | Functional hyaluronidase from microbial or human sources |
| 4. | Staphylococcal or streptococcal erythrogenic toxin |
| 5. | Staphylococcal protein a or a domain thereof |
| 6. | Staphylococcal hemolysin and functional microbial toxins |
| 7. | Functional microbial or human coagulase |
| 8. | Costimulatory protein |
| 9. | Chemoattractants |
| 10. | Chemokines |
| 11. | Nucleic acids encoding biosynthesis of lipopolysaccharides |
| 12. | Nucleic acids encoding biosynthesis of glycosylceramides |
| 13. | Nucleic acids encoding biosynthesis of microbial membrane or capsular lipoproteins |
| | and polysaccharides |
| 14. | Oncogenes, amplified oncogenes and transcription factors |
| 15. | Angiogenic factors and receptors |
| 16. | Tumor growth factor receptors |
| 17. | Tumor suppressor receptors |
| 18. | Cell cycle proteins |
| 19. | Heat-shock proteins, ATPases and G proteins |
| 20. | Proteins engaged in antigen processing, sorting and intracellular trafficking |
| 21. | Inducible nitric oxide synthase (iNOS) |
| 22. | apolipoproteins (e,g,. Lp(a)) transfected into tumor cells & sickled erythrocytes used for |
| | targeting tumor microvasculature |
| 23. | LDL and oxyLDL receptors (e.g., SCEP receptor) transfected into tumor cells and |
| | sickled erythrocytes & used for targeting to tumor microvasculature |
| B. | Ex Vivo Immunization of T and/or NKT cells to Produce Tumor Specific Effector Cells |
| | (for Adoptive Immunotherapy)* |
| | Accomplish by (i) transfecting or co-transfecting tumor or accessory cells with nucleic acid |
| | encoding the following, or (ii) providing immobilized molecules or receptors that present the |
| | following: |
| 1. | Superantigen |
| 2. | Superantigen receptor and transcription factor with bound superantigen |
| 3. | CD1 receptor binding and/or expressing superantigen-glycosyl ceramide complex |
| 4. | CD14 receptor binding or expressing superantigen-lipopolysaccharide or superantigen- |
| | peptidoglycan complex |
| 5. | Mannose receptor binding glycosylated superantigen |
| 6. | Glycophorin receptor |
| 7. | Superantigen-tumor peptide(s) complex on MHC or CD1-bearing APC in soluble or |
| | immobilized form |
| C. | Therapeutic Molecules or Complex Applied to Transfected or Untransfected Tumor |
| | cells or Accessory Cells; or MHC class I, class II, CD1, Superantigen receptor or CD14 |
| | receptor: |
| 1. | Superantigen (wherein cell may express Gal) |
| 2. | Glycosylated superantigen |
| 3. | Superantigen complex with |
| a. | glycosyl ceramide |
| b. | lipopolysaccharide |
| c. | peptidoglycan |
| d. | mannan proteoglycan |
| e. | muramic acid |
| f. | tumor peptide |
| g. | glycosylceramides with terminal Gal(α1-4)Gal |
| | e.g. globotriosylceramide and galabiosylceramide |
| h. | Conjugates of SAg-(Gb2 or Gb3 or Gb4) |
| i. | Conjugates of SAg-(Gb2 or Gb3 or Gb4)-CD1 |
| j. | GPI anchored conjugates: SAg-GPI-(Gb2 or Gb3 or Gb4) |
| l. | GPI anchored conjugates: SAg-GPI-(Gb2 or Gb3 or Gb4)-CD1 |
| m. | Conjugates of SAg polypeptide or nucleic acid with Verotoxin |
| n. | Conjugates of SAg polypeptide or nucleic acid with Verotoxin A or B subunit |
| o. | Conjugates of SAg polypeptide or nucleic acid with IFNα receptor peptides homologous |
| | to verotoxin |
| p. | Conjugates of SAg polypeptide or nucleic acid with CD19 peptides homologous to |
| | verotoxin |
| q. | Conjugates of SAg polypeptide or nucleic acid with Arg-Gly-Asp or Asn-Gly-Arg |
| r. | Conjugates of SAg polypeptide or nucleic acid with LDL, VLDL, HDL |
| s. | Conjugates of SAg polypeptide or nucleic acid with Apolipoproteins (e.g., Lp(a), apoB- |
| | 100, apoB-48, apoE) |
| 9. | Conjugates of SAg polypeptide or nucleic acid with oxyLDL, oxyLDL |
| | mimics, (e.g., 7β-hydroperoxycholesterol, 7β-hydroxycholesterol, 7-ketocholesterol, 5α- |
| | 6 α-epoxycholesterol, 7β-hydroperoxy-choles-5-en-3β-ol, 4-hydroxynonenal (4-HNE), |
| | 9-HODE, 13-HODE and cholesterol-9-HODE) |
| 10. | Conjugates of SAg polypeptide or nucleic acid with oxyLDL |
| | byproducts (e.g. lysolecithin, lysophosphatidylcholine, malondialdehyde, 4- |
| | hydroxynonenal) |
| v. | LDL & oxyLDL receptors (e.g., LDL oxyLDL, acetyl-LDL, VLDL, LRP, CD36, SREC, |
| | LOX-1, macrophage scavenger receptors) as polypeptide or nucleic acid alone or with |
| | SAg polypeptide or nucleic acid intratumorally |
| 11. | phytosphingosine, -GPI-phytosphinosine, |
| 12. | tumor associated lipid antigens, glycolipid, proteolipid, glycosphingolipid, sphingolipid |
| | with inositolphosphate-containing head groups, phytoglycolipids, mycoglycolipids. |
| | GPI-sphingosines or lipids |
| y. | sphingolipids with inositolphosphate-containing head groups having the general |
| | structure: ceramide-P-myoinositol-X with X referring to polar substituents comprising |
| | ceramide-p-inositol-mannose, inositol-1-P-(6)mannose(α1,2inositol-1P-(l) ceramide, |
| | (inositol-P)2-ceramide, inositol-P-inositol-P-ceramide, inositol-P-inositol-P-ceramide. |
| z. | tumor associated glycan antigens consisting of peptidoglycans or glycan |
| | phosphotidyinositol (GPI) structures. |
| z | chemokine receptors polypeptide or nucleic acid |

II. CELLS: Specialized Tumor Specific Effector Cells (T and/or NKT Cells)
USE: Adoptive Immunotherapy In Vivo
PURPOSE:

| | |
|---|---|
| A. | CD44 Expression on T cells or NKT |
| | Accomplished by: (i) Superantigen stimulation; and/or (ii) transfection with nucleic acid |
| | encoding CD44 and/or (iii) transfection with nucleic acid encoding glycosyltransferase |
| B. | Chimeric TCR with: |
| | Invariant a chain site for binding GalCer and |
| | Vβ chain site for binding superantigen |
| C. | Dual TCR Vβ chains with sites for superantigen binding |
| D. | T cells or NKT cells with overexpressed Vβ region specific for a given superantigen |
| E. | T cells or NKT cells with lowered signal transduction threshold |

III. MOLECULES: Superantigen mimics
USE: In Vivo Administration

| | |
|---|---|
| A. | Superantigen receptor-binding oligonucleotides |
| B. | Superantigen oligonucleotide-peptide conjugate |
| | Oligo nucleofide is specific for superantigen receptor on tumor cells |
| | Peptide has deleted class II binding site and intact TCR binding site |
| C. | Phage displayed integrin ligand on tumor neovasculature - carrier for superantigen- |
| | encoding nucleic acid. |

IV. CARRIERS: for nucleic acid encoding superantigen
USE Transfection of Tumors In vivo

| | |
|---|---|
| A. | Sickled erythrocytes that target tumor neovasculature |
| B. | Phage displayed tumor neovascular integrin and superantigen receptor carrying |
| | superantigen nucleic acids |

V. CARRIERS: constructed to co-express superantigen conjugates or complexes with:

Glycosylceramide
αGal
Lipopolysaccharides
Peptidoglycans

USE Transfection of Tumor Cells and/or DCs and/or DC/tc's - in vivo or ex vivo.

| | |
|---|---|
| A. | Liposomes |
| B. | Proteosomes |

### DESCRIPTION OF THE PREFERRED EMBODIMENTS

[0049] The present invention provides methods and materials for treating cancer related to the polypepide or nucleic acid conjugates or fusions comprising SAg with other molecules that synergize or cooperate with SAg in the induction of an anti-tumor response. The present invention also provides materials and methods for treating cancer related to transfection of cells with nucleic acid that encode a SAg and/or another polypeptide. The cells can be transfected in vivo or in vitro. The expression of the SAg polypeptide activates host immunocytes, such as T or NKT cells.

[0050] As used in this application, T cells are defined as any class of lymphocytes that undergo maturation and differentiation in the thymus. They include, but are not limited to NK cells, NKT cells and /T cells and may be known as cytotoxic, helper or suppressor T cells or they may be defined by the expression or type of CD or TCR present. The same transfected nucleic acid molecule, or a separate nucleic acid molecule, can also encode another polypeptide such as an adhesion molecule, glycosyltransferase, glycosidase, CD44, cytokine, tumor associated antigen, costimulatory molecule, and the like. In addition, cells transfected in vitro or ex vivo with any of these nucleic acids as well as T cells activated by these transfected cells are administered directly to a cancer-bearing host. Cells transfected in vitro or ex vivo as well as cells activated ex vivo may additionally express a tumor associated antigen expected to be present on host cancer cells.

[0051] Further, cells transfected with nucleic acid that encodes a SAg polypeptide is also be used as a vaccine to immunize a host against a cancer previously present in the host or a cancer that is likely to develop in the host. For example, a host can be vaccinated against a particular cancer by administering tumor cells transfected with nucleic acid encoding a SAg. Alternatively, a SAg transfected cell is used to activate a host T cell population in vitro. This activated T cell population is then administered to a host as a cancer treatment (immunotherapeutic agent). Once activated ex vivo or in vivo, these T cells are expanded with cytokine treatment such as IL-2 treatment.

[0052] Cells to be “transfected” include accessory cells, immunocytes, fibroblasts, or tumor cells. Accessory cells may include, without limitation, endothelial cells, DCs, monocytes, macrophages as well as B and T lymphocytes which can play an “accessory” as well as direct effector role in an immune response. When transfected in vitro, the cells can be xenogeneic, allogeneic to the host to provide, among other things, additional immunogenicity. Preferably, the transfected cells that are administered to a host, preferably a human, are syngeneic or autologous (or autochthonous).

[0053] Cells transfected with nucleic acid encoding a SAg may also express a tumor associated antigen that is potentially present on host cancer cells. For example, nucleic acid encoding a known tumor antigen are transfected into the SAg-containing cell, or a tumor cell that endogenously contains many different tumor antigens are transfected with SAg-encoding nucleic acid. In the latter case, additional nucleic acids encoding other polypeptides are transfected into the tumor cell. For example, nucleic acid encoding a carbohydrate modifying enzyme such as α1,3-galactosyltransferase, adhesion molecule, costimulatory molecule such as B7-1 and B7-2, MHC class I molecule and/or MHC class II molecule are cotransfected into tumor cells together with nucleic acid encoding a SAg.

[0054] SAg-encoding nucleic acid can encode a mutant, variant, and/or modified form of a SAg. These forms can be used to transfect T cells, alone or in combination with wild-type SAg-encoding acid. In addition, tumor cells are provided with the capacity to colonize sites of metastases and the ability to locally hydrolyze surrounding tumor ground substance and neovasculature by transfection of key bacterial Staphylococcal and Streptococcal enzymes, toxins and capsular polysaccharides which confer upon the tumor cell additional tumor killing properties and immunogenicity. The transfected genes include staphylococcal hyaluronidase (tissue spreading factor), Staphylococcal erythrogenic toxin and Streptococcal capsular polysaccharide. The tumor cell may thus be capable of mimicking the tissue invasive and destructive properties of the Streptococcus and Staphylococcus as they produce a sterile cellulitis localized to tumor sites.

[0055] These methods are used to treat any solid tumor such as carcinoma, melanoma, and sarcoma, or cancers of hematopoietic origin such as leukemia and lymphomas. This invention also provides for T cells or NKT cells including γ/6T cells which after activation by SAgs in native or mutant form or transfected into tumor cells express surface phenotypes which enhance their ability to traffic efficiently to tumor sites in vivo. Such phenotypes include CD44 and/or selective Vβ expression. In response to these SAg stimulants, the T cells produce TH1 cytokines and, in particular, IFNγ and IL-2.

[0056] Further, provided are methods of overcoming the T cell unresponsiveness of cancer patients by transfection of T cells from tumor bearing host with the nucleic acids encoding the SAg receptor thus enabling these cells to be reactivated by exogenous SAg and used for adoptive immunotherapy in the same cancer patient.

[0057] Provided herein are SAg oligonucleotide and oligonucleotide-peptide compositions capable of targeting and delivering SAgs to tumor sites in vivo without elimination by circulating naturally occurring SAg specific antibodies prevalent in the human cancer patients. Provided also are compositions and methods for delivery of therapeutic nucleic acid constructs to tumor sites in vivo using therapeutic genes carried by erythrocytes from patients with sickle cell anemia which have the unique capability of adhering to sites on tumor neovasculature.

[0058] 1. Cancer

[0059] This invention is used to treat any type of cancer in a host at any stage of the disease. More particularly, the cancer is a solid tumor such as a carcinoma, melanoma, or sarcoma. This invention is used to treat cancers of hemopoietic origin such as leukemia or lymphoma, that involve solid tumors. A host is any animal that develops cancer and has an immune system such as mammals. Thus, humans are considered hosts within the scope of the invention.

[0060] Since the invention provides SAg-transfected cells as a vaccine, a cancer is one that a host is likely to develop based on family history or other criteria. In this case, the host is one that is susceptible to cancer.

[0061] 2. Nucleic Acid

[0062] The term nucleic acid as used herein encompasses both RNA and DNA, including cDNA, genomic DNA, and synthetic (e.g., chemically synthesized) DNA. The nucleic acid can be double-stranded or single-stranded. Where single-stranded, the nucleic acid can be the sense strand or the antisense strand.

[0063] The term isolated nucleic acid means that the nucleic acid is not immediately contiguous with both of the sequences with which it is immediately contiguous (one on the 5′ end and one on the 3′ end) in the naturally occurring genome of the organism from which it is derived. For example, an isolated nucleic acid molecule can be, without limitation, a recombinant DNA molecule of any length, provided nucleic acid sequences normally found immediately flanking that recombinant DNA molecule in a naturally occurring genome are removed or absent. Thus, an isolated nucleic acid molecule includes, without limitation, a recombinant DNA that exists as a separate molecule (e.g., a cDNA or a genomic DNA fragment produced by PCR or restriction endonuclease treatment) independent of other sequences as well as recombinant DNA that is incorporated into a vector, an autonomously replicating plasmid, a virus (e.g., a retrovirus, adenovirus, or herpes virus), or into the genomic DNA of a prokaryote or eukaryote. In addition, an isolated nucleic acid can include a recombinant DNA molecule that is part of a hybrid or fusion nucleic acid sequence.

[0064] Typically, regulatory elements are nucleic acid sequences that regulate the expression of other nucleic acid sequences at the level of transcription and/or translation. Thus, regulatory elements include, without limitation, promoters, operators, enhancers, ribosome binding sites, transcription termination sequences (i.e., a polyadenylation signal), and the like. In addition, regulatory elements can be, without limitation, synthetic DNA, genomic DNA, intron DNA, exon DNA, and naturally-occurring DNA as well as non-naturally-occurring DNA. It is noted that isolated nucleic acid molecules containing a regulatory element are not required to be DNA even though regulatory elements are typically DNA sequences. For example, nucleic acid molecules other than DNA, such as RNA or RNA/DNA hybrids, that produce or contain a DNA regulatory element are considered regulatory elements. Thus, recombinant retroviruses having an RNA sequence that produces a regulatory element upon synthesis into DNA by reverse transcriptase are isolated nucleic acid molecules containing a regulatory element even though the recombinant retrovirus does not contain any DNA.

[0065] 3. Transfection

[0066] The term “transfection,” of a nucleic acid into a cell, as used herein is intended to include “transformation,” “transduction,” “gene transfer” and the like, as they are commonly used in the art. “Transfection” is not intended to be limited to transfer of nucleic acid into a cell by means of an infectious particle such as a retrovirus, as the term may have been used originally. Rather any form of delivery and introduction of a nucleic acid molecule, preferably DNA, into a cell, whether in the form of a plasmid, a virus, a liposome-based vector, or any other vector, so that the nucleic acid is expressed in the cell and its protein product(s) made, is included within the definition of “transfection.”

[0067] When a nucleic acid is said to “encode” a product other than a protein, this language is intended to mean that it encodes the necessary proteins/enzymes that are involved in, or required for, the synthesis of that product. For example, if a DNA molecule is said to encode LPS, it clearly encodes one or more proteins (enzymes) that are involved in the biosynthesis of LPS. If a nucleic acid is said to “encode the biosynthesis” of a structure, it means that the nucleic acid encodes the enzymes that participate in the creation of that structure. In particular for the carbohydrate structures referred to herein, the nucleic acids used in the invention are introduced into a cell that normally does not make, or makes little of, the carbohydrate structure so as to provide to that cell the genetic material for an enzyme or enzymes that generate the carbohydrate structure or modify a different carbohydrate structure to that one indicated. As a further example, DNA encoding a tumor antigen may directly encode a protein/peptide tumor antigen, or alternatively, may encode proteins or peptides that either contribute structurally to, or catalyze the synthesis of, a tumor antigen which is partly protein (e.g., lipoprotein or proteoglycan) or totally non-protein (e.g., a glycolipid).

[0068] The invention provides methods of treating cancer in a host by transfecting cells with SAg-encoding nucleic acid. Suitable host or non-host cells for transfection include, without limitation, endothelial cells, DCs, monocytes, macrophages, B cells, T cells, immunocytes, muscle cells, fibroblasts, NK cells, NKT cells (TCR ab⁺ CD4^{neg} and CD8^{neg}), g/d T cells and tumor cells. The terms accessory cell and antigen presenting cell (APC) can be used interchangeably and include cells having the ability to process and present antigens to T cells as well as to provide both defined and less well defined growth and differentiation factors (costimulatory signals) during an ongoing immune response.

[0069] Cells are transfected in vivo or in vitro. When transfected in vivo, the cells are of host origin. When transfected in vitro, the cells are autologous, allogeneic, or xenogeneic to the host to provide additional immunogenicity. In addition to being transfected with nucleic acid encoding a SAg, the cells are transfected with nucleic acid encoding any other polypeptide including, without limitation, a galactosyltransferase, staphylococcal hyaluronidase and/or erythrogenic toxin, streptococcal capsular polysaccharide, CD44, tumor antigen, costimulatory molecule such as B7-1 and B7-2, adhesion molecules, MHC class I molecule and/or MHC class II molecule. Nucleic acids encoding the molecules are cotransfected with the SAgs. But for others, including but not limited to Staphylococcal hyaluronidase, erythrogenic toxin, Streptococcal capsular polysaccharide and CD44 genes, the nucleic acids encoding the SAgs are fused to other nucleic acids resulting in expression of a fusion protein.

[0070] Methods for in vivo and in vitro transfection of cells are well known. For example, two books in the series Methods in Molecular Medicine published by Humana Press, Totowa, N.J., describe in vivo and in vitro transfection protocols that are adaptable to the present invention (Vaccine Protocols edited by Robinson et al., (1996) in Gene Therapy Protocols edited by Robbins et al., Humana Press, Totowa, N.J. (1997)). Transfection protocols are also discussed elsewhere ((Sambrook, J. et al., Molecular Cloning, Second Edition, Cold Springs Harbor Laboratory Press, Plainview, N.Y., (1989)). In addition, use of various vectors to target epithelial cells, use of liposomal constructs, methods of transferring nucleic acid directly into T cells, hematopoietic stem cells, and fibroblasts, methods of particle-mediated nucleic acid transfer to skin cells, and methods of liposome-mediated nucleic acid transfer to tumor cells have been described elsewhere. (Felgner, P L et al., Cationic Lipids for Intracellular Delivery of Biologically Active Molecules, U.S. Pat. No. 5,459,127, issued Oct. 17, 1995; Felgner, P L, Cationic Lipids for Intracellular Delivery of Biologically Active Molecules, U.S. Pat. No. 5,264,618, issued Nov. 23, 1993; Felgner, P L, Exogenous DNA Sequences in a Mammal, U.S. Pat. No 5,580,859 issued Dec. 3, 1996; Felgner, P L, A Protective Immune Response in a Mammal by Injecting a DNA Sequence, U.S. Pat. No. 5,589466 issued Dec. 31, 1996).

[0071] Further, use of ligand-based nucleic acid carriers to effect transfection of mammalian cells in vivo has been described elsewhere (Wu et al., J. Biol. Chem., 262:4429-4432 (1987); Wu et al., J. Biol. Chem., 263:14621-14624 (1988); Wu et al., J. Biol. Chem., 264:16 985-16987 (1989); Wu et al., J. Biol. Chem., 266:14338-14342 (1991); and Garrigues J et al., Am. J. Path. 142:607-622 (1993)). Briefly, plasmid DNA is conjugated to a desialylated branched carbohydrates such as orosomucoid by carbodiimide crosslinking to polylysine and targeted to asialoprotein receptors expressed on cells in the liver. In addition, enhanced nucleic acid delivery and expression can be achieved using a ligand-polylysine conjugate coupled to carbohydrate moieties on viruses that is then combined with DNA. These preparations are suitable for parenteral injection and are readily taken up by cells expressing asialoprotein receptors in the liver after which the DNA is internalized and integrated into the host genome. In addition, nucleic acid can be administered intravenously, intramuscularly, or subcutaneously to induce a response in a host.

[0072] Thus, targeting nucleic acid to the surface of particular cells is accomplished by conjugating nucleic acid to molecules that bind to a cell surface structure such as a receptor. Examples of cell surface structures that can be targeted include, without limitation, the transferrin receptor, and asialoglycoprotein receptor. The molecules that bind cell surface structures and are conjugated to nucleic acid for targeting can be, without limitation, natural ligands for the surface structure, synthetic compositions that exhibit specific binding, and antibodies directed against the surface structure. For example, a monoclonal antibody specific for a cell surface epitope such as the BR96 antibody that recognizes Le^{x} carbohydrate epitope abundantly expressed by colon, breast, ovary, and lung carcinomas can be used. Other monoclonal antibodies can include, without limitation, those that recognize growth factor receptors, transferrin receptors, IL-2 receptors, epidermal growth factor receptors, the hev oncogene, and TAPA-1 as well as any other antibody having specificity for a surface structure that can be internalized.

[0073] Liposomes containing nucleic acid are also targeted to specific cell types such that the nucleic acid is expressed. For example, nucleic acid is loaded into or attached to cationic DOTMA: doleoylphosphatidylethanolamine (DOPE) liposomes that contain exposed molecules that bind to a cell surface structure such as tumor cells or tumor microvasculature (Example 5). The molecules that bind cell surface structures and are attached to liposomes can be, without limitation, natural ligands for the surface structure, synthetic compositions that exhibit specific binding, and antibodies directed against the surface structure. Maximal transfer of nucleic acids encoding SAgs is attained by synthesizing the liposomes with an appropriate ratio of nucleic acid to lipid. In addition, these nucleic acid-containing liposomes are administered intravenously, intramuscularly, or subcutaneously to induce a response in a host.

[0074] Naked nucleic acid is also administered to a host. For example, naked pharmaceutical-grade plasmid DNA are injected into a host intramuscularly such that it is expressed by host cells (U.S. Pat. Nos. 5,589,466; 5,580,599; 5,264,618; 5,459,127; and 5,561,064). In addition, cationic lipids are used to deliver biologically active molecules, such as oligonucleotides to host cells in vivo (U.S. Pat. Nos. 5,264,618, 5,459,127, and 5,561,064). Thus, nucleic acid encoding a SAg is administered to a host in naked or cationic lipid form such that the SAg is expressed. It is noted that any nucleic acid described herein can be administered in vivo as naked DNA. Further, other methods of administering naked DNA to a host can be used such as those related to the direct injection of naked DNA for use in vaccines (Cohen et al., Science 259:1691-1692 (1993); Corr et al., J. Exp. Med. 184:1555-1560 (1996); Varmus et al., Proc. Natl. Acad. Sci. USA 81:5849-5852 (1984); and Benveniste et al., Proc. Natl. Acad. Sci. USA 83:9551-9555 (1986)).

[0075] Our previous patent applications which are hereby incorporated by reference include U.S. patent applications Ser. No. 07/416,530, filed Oct. 3, 1989, U.S. patent application Ser. No. 07/466,577, filed Jan. 17, 1990, U.S. patent application Ser. No. 07/891,718, filed Jun. 1, 1992, U.S. patent application Ser. No. 08/025,144, filed Mar. 2, 1993, U.S. patent application Ser. No. 08/189,424, filed Jan. 31, 1994, U.S. patent application Ser. No. 08/491,746, filed Jun. 19, 1995, PCT applications PCT/US91/00342, and PCT/US94/02339. These applications have given comprehensive description of the SAg genes, the creation of high enterotoxin producing mutant strains as well as recombinant methods of production of SAgs. In addition, methods of treating cancer by transfecting tumor cells in vivo and in vitro with SAg nucleotides using well defined recombinant technology have been described in these applications. Subsequently, Dow et al., (J. Clin. Invest. 99: 2616-2624 (1997)) described in vitro and in vivo transfection of eukaryotic cells with SAg DNA which was capable of inducing inflammatory responses in vivo. It is noted that the SAg genes have been cloned and their sequences delineated before 1988 and methods used to transfect cells in vivo or in vitro with nucleic acids encoding polypeptides are also well known in the art.

[0076] 4. Constructs

[0077] Tumor cells are transfected with various nucleic acids which are designed to increase their immunogenicity and to provide them with capacity to traffic to metastatic sites where they may initiate a potent inflammatory and immune response. Such constructs of this invention can be linear or circular nucleic acids obtained from mammals or bacteria that encode a polypeptide such as a SAg, mutant SAg, erythrogenic toxin, enzymes involved in the biosynthesis of glycosyltransferases, bacterial glycosylceramides, LPS's, lipoproteins, capsular or membrane polysaccharides, microbial toxins and enzymes such as hyaluronidase, collagenase, elastase, coagulase, protease, kinase, lipase. Constructs may also contain tumor associated antigens, costimulatory molecules such as B7-1 and B7-2, adhesion molecules, receptor molecules such as SAg receptors, CD1, CD14, MHC class I molecules and/or MHC class II receptors. Such constructs may also contain amplified nucleic acids associated with tumors such as oncogenes, transcription factors, angiogenesis factors and receptors, tumor growth factor receptors, chimeric receptors. The latter nucleic acids may be linked to SAg-encoding nucleic acid to produce heightened expression of the SAg. The amplified nucleic acids may include tumor tissue specific promoters and nucleic acids that direct the colonization or metastasis of tumors to selected sites in vivo.

[0078] Constructs can also contain elements that regulate and/or promote the expression of an encoded polypeptide. For example, a construct containing nucleic acid that encodes enterotoxin B (SEB) can have a strong promoter element upstream of the SEB encoding sequence. In addition, constructs can contain nucleic acid that anchors an encoded polypeptide to the cell surface after expression. For example, a construct containing nucleic acid that encodes SEB can contain a membrane-anchoring sequence such as nucleic acid that encodes a hydrophobic stretch of amino acids or a glycosylphosphatidylinositol (GPI)-anchoring motif. Thus, the SAg, or other polypeptides as well, can be anchored in the plasma membrane by coupling to membrane lipids or glycolipids. These anchors can be attached to the C terminus of the polypeptide in the endoplasmic reticulum. Alternatively, a SAg known to be associated with the cell surface after expression can be used such as the mammary tumor viral (MMTV) SAg that is GPI-linked.

[0079] In one embodiment, SAgs as well as SAg receptors are engineered to remain anchored to the surface of transfected cells when the cell is to be used for immunization. Likewise, when a SAg receptor gene is transfected into anergized T cells from cancer patients, it is desirable to express the receptor on the cell surface so that they are readily recognized and activated by exogenous receptor bound SAg. In contrast, when it is desirable to use SAg transfected cells to activate T cells in vivo or ex vivo or to promote trafficking of transfected tumor cells to metastatic sites in vivo, it is suitable for the SAg to be secreted from the transfected cells.

[0080] In additional embodiments, potent tumor specific effector T or NKT cell clones are produced with overexpressed Vβ regions of their TCRs making them highly receptive to activation by exogenous SAg. Likewise CD44 genes are transfected into T cells or NKT cells making them more susceptible to expression of this epitope after SAg stimulation.

[0081] Constructs also contain a selectable marker or reporter such that transfected cells can be isolated. For example, a construct containing nucleic acid that encodes a SAg can also contain nucleic acid that encodes a polypeptide that confers resistance to a selection agent such as neomycin (also called G418), puromycin, or kanamycin.

[0082] Nucleic acid and nucleic acid constructs of the present invention are incorporated into a vector, an autonomously replicating plasmid, or a virus (e.g., a retrovirus, adenovirus, or herpes virus). Typically, these vectors, plasmids, and viruses can replicate and function independently of the cell genome or integrate into the genome. Vector, plasmid, and virus design depends on, for example, the intended use as well as the type of cell transfected. Appropriate design of a vector, plasmid, or virus for a particular use and cell type is within the level of skill in the art. In addition, a single vector, plasmid, or virus can be used to express either a single polypeptide or multiple polypeptides. It follows that a vector, plasmid, or virus that is intended to express multiple polypeptides will contain one or more operably linked regulatory elements capable of effecting and/or enhancing the expression of each encoded polypeptide.

[0083] The term “operably linked” means that two nucleic acid sequences are in a functional relationship with one another. For example, a promoter (or enhancer) is operably linked to a coding sequence if it effects (or enhances) the transcription of the coding sequence. A ribosome binding site is operably linked to a coding sequence if it is positioned to facilitate translation. Operably linked nucleic acid sequences are often contiguous, but this is not a requirement. For example, enhancers need not be contiguous with a coding sequence to enhance transcription of the coding sequence.

[0084] A vector, plasmid, or virus that directs the expression of a polypeptide such as a SAg can include other nucleic acid sequences such as, for example, nucleic acid sequences that encode a signal sequence or an amplifiable gene. Signal sequences are well known in the art and can be selected and operatively linked to a polypeptide encoding sequence such that the signal sequence directs the secretion of the polypeptide from a cell. An amplifiable gene (e.g., the dihydrofolate reductase [DHFR] gene) in an expression vector can allow for selection of host cells containing multiple copies of the transfected nucleic acid.

[0085] Standard molecular biology techniques are used to construct, propagate, and express the nucleic acid, nucleic acid constructs, vectors, plasmids, and viruses of the invention ((Sambrook, J. et al., supra; Maniatis et al., Molecular Cloning (1988); and U.S. Pat. No. 5,364,934. For example, prokaryotic cells (e.g., E. coli, Bacillus, Pseudomonas, and other bacteria), yeast, fungal cells, insect cells, plant cells, phage, and higher eukaryotic cells such as Chinese hamster ovary cells, COS cells, and other mammalian cells can be used.

[0086] Constructs are used in vivo or ex vivo or in combination as in Example 5-7, 16-23. They are used to immunize a host by direct in vivo administration or they are used ex vivo to activate T cells or NKT cells to become tumor specific effector cells which are employed for adoptive immunotherapy of cancer by methods and models (Examples 7, 16, 19-23).

[0087] To test the anti-tumor-inducing ability of a particular construct as well as the transfected cell itself, the following general assay is performed. B16 melanoma, A20 lymphoma, host tumor cells, or any other tumor cell lines appropriate to the host (i.e., having tumor antigens expected to be present on the host tumor cells) are transfected with a given construct. Appropriate numbers of transfected cells (e.g., 10⁵-10⁷ cells) are then implanted subcutaneously into animals such as mice, rats, rabbits, or the like and 1-6 months later untransfected tumor cells are implanted. Tumor outgrowth from the untransfected tumor cells is measured and compared to control animals not given the transfected tumor cells. If tumor outgrowth is reduced or prevented, then the transfected cells are effective anti-tumor agents useful as tumor vaccines. Alternatively, 10⁵-10⁷ transfected tumor cells can be given 3-10 days after the appearance of established tumors from untransfected tumor cells. If tumor outgrowth is reduced or arrested, then the transfected cells are effective anti-tumor agents useful in treating established tumors.

[0088] To test the anti-tumor effect of SAg activated T cells, NKT cells or T cells clones overexpressing Vβ or CD44, the following general protocol is used. Lymph node cells from C57/B1 mice bearing MCA 205 or 207 sarcomas which were implanted in the adjacent inguinal region three to ten days before are extracted and placed in tissue culture. The cells are incubated with various enterotoxins for two days and then with IL-2 for an additional two to three days. The cells are then harvested and injected into syngeneic mice with established pulmonary metastases (six to twelve days after tumor injection). Three weeks later the animals are evaluated for pulmonary metastases compared to controls which receive no cells or cells that were stimulated without enterotoxins. The adoptively transferred cells may be enriched for NKT cells or T cells alone (to include /T cells) which are selectively injected into tumor bearing hosts. Likewise, they are selected for predominant expression of the CD44 phenotype during the SAg activation phase at which time the CD44 enriched population is harvested and used for adoptive immunotherapy. The dose of injected T cells, NKT cells or γ/δ T cells and/or CD44 enriched cells (which are produced by any of these T cell, NKT cell or γ/δ T cell populations) range from 10⁶ to ⁷ and are be given on a schedule of once weekly for one to four weeks.

[0089] 5. Superantigens (SAgs)

[0090] SAgs are polypeptides that have the ability to stimulate large subsets of T cells. SAgs include Staphylococcal enterotoxins, Streptococcal pyrogenic exotoxins, mycoplasma antigens, rabies antigens, mycobacteria antigens, EB viral antigens, minor lymphocyte stimulating antigen, mammary tumor virus antigen, heat shock proteins, stress peptides, clostridial and toxoplasmosis antigens and the like. Any SAg can be used as described herein, although, Staphylococcal enterotoxins such as SEA, SEB, SEC, and SED and streptococcal pyrogenic exotoxins such as toxic shock-associated toxin (TSST-1 also called SEF) are preferred.

[0091] When using enterotoxins, the region related to emetic activity can be omitted to minimize toxicity. In addition, SAgs can be derivatized to minimize toxicity. The level of toxicity may not be a concern when using SAg transfected cells to activate lymphocytes ex vivo since the lymphocytes can be rinsed of SAg polypeptide prior to administration to a host.

[0092] The nucleic acid sequences that encode SAgs are known and readily available. For example, Staphylococcal enterotoxin A (SEA) (SEQ ID NOS:7-8), SEB (SEQ ID NOS:9-10), SEC (SEQ ID NOS:11-12), SED (SEQ ID NOS:13-14), SEE (SEQ ID NOS:15-16), TSST-1 (SEQ ID NOS:17-18), and Streptococcal pyrogenic exotoxin (SPEA) (SEQ ID NOS: 19-20) have been cloned and can be expressed in E. coli (Betley M J and J J Mekalonos, J. Bacteriol. 170:34 (1987); Huang I Y et al., J. Biol. Chem., 262:7006 (1987); Betley M et al., Proc. Natl. Acad. Sci. USA, 81:5179 (1984); Gaskill M E and S A Khan, J. Biol. Chem., 263:6276 (1988); Jones C L and S A Khan, J. Bacteriol., 166:29 (1986); Huang I Y and M S Bergdoll, J. Biol. Chem., 245:3518 (1970); Ranelli D M et al., Proc. Nat. Acad. Sci. USA 82:5850 (1985); Bohach G A, Infect Immun., 55:428 (1987); Bohach G A, Mol. Gen. Genet. 209:15 (1987); Couch J L et al., J. Bacteriol. 170:2954 (1988); Kreiswierth B N et al., Nature, 305:709 (1983); Cooney J et al., J. Gen. Microbiol., 134:2179 (1988); Iandolo J J, Annu. Rev. Microbiol., 43:375 (1989); and U.S. Pat. No. 5,705,151)). Additional nucleic acid sequences encoding SAgs are described elsewhere (Bohach et al., Crit. Rev. in Microbiology 17:251-272 (1990); (Kotzin, B L et al., Advances Immunology 54: 99-165 (1993)).

[0093] PCR can be used to isolate SAg-encoding acid. For example, the nucleic acid encoding SEA, SEB, and TSST-1 can be isolated as described elsewhere (Dow et al., J. Clin. Invest. 99:2616-2624 (1997)). Briefly, the following primers can be used to amplify the SAg-encoding nucleic acid:

| | | |
|---|---|---|
| SEA forward: | (SEQ ID NO:21) | GGGAATTCCATGGAGAGTCAACCAG, |
| SEA backward: | (SEQ ID NO:22) | GCAAGCTTAACTTGTTAATAG; |
| SEB forward: | (SEQ ID NO:23) | GGGAATTCCATGG-AGAAAAGCG, |
| SEB backward: | (SEQ ID NO:24) | GCGGATCCTCACTTTTTCTTTG; and |
| TSST-1 forward: | (SEQ ID NO:25) | GGGGTACCCCGAAGGAGGAAAAAAAAATGTCTACAAACGATAATATAAAG, |
| TSST-1 backward: (SEQ ID NO:26) | TGCTCTAGAGCATTAATTAATTTCTGCTTCTATAGTTTTTAT. | |

[0094] The full-length TSST-1 nucleic acid sequence is cloned into a eukaryotic expression vector (pCR3; InVitrogen Corp., San Diego, Calif.), whereas only the sequence corresponding to the mature SEB and SEA (sequences minus the putative bacterial signal sequences) is cloned into pCR3. Removal of the SEB and SEA signal sequences increases the level of expression in transfected cells. The plasmids are grown in Escherichia coli and plasmid DNA extracted by the modified alkaline lysis method and purified on a CsCl gradient.

[0095] Nucleic acids encoding mutant or variant SAgs are also considered nucleic acid sequences encoding SAgs within the scope of the invention. For example, a mutant SAg-encoding acid sequence is engineered such that the resulting SAg is devoid of amino acid residues, e.g., histidine, known to produce toxicity. Likewise, SAg-encoding nucleic acid is engineered to contain or lack sequences that facilitate the selective binding of SAgs to certain Vβ regions of the TCR present on T cells or to ganglioside, mannose (or other carbohydrate) receptor, certain regions of MHC class II, and/or enterotoxin receptors present on tumor cells, antigen presenting cells (APCs), and/or lymphocytes.

[0096] Nucleic acid sequences that encode a SAg are also fused, in frame, with nucleic acid that encodes another polypeptide. This larger nucleic acid is termed herein a SAg fusion gene and the resulting polypeptide product is a SAg fusion product. Nucleic acid sequences that are fused to SAg-encoding nucleic acid include, without limitation, nucleic acid sequences that encode tumor antigens, costimulatory molecules, adhesion molecules and MHC class II molecules. The superantigen fusion product is secreted by a transfected cell, expressed on the cell surface or it may remain intracellular in nucleic acid or partly processed form.

[0097] SAgs are also isolated and purified from their natural source as well as from a heterologous expression system such as E. coli. Likewise, SAg-containing polypeptides (e.g., SAg fusion products) are isolated and purified from a heterologous expression system. In addition, Staphylococcus strains producing high levels of enterotoxin have been identified and are available. For example, exposing enterotoxin-producing Staphylococcus aureus to mutagenic agents such as N-methyl-N-nitro-N-nitrosoguanidine results in a 20 fold increase in enterotoxin production over the amounts produced by the parent wild-type Staphylococcus aureus strain (Freedman M A and Howard M B J. Bacteriol., 106:289(1971)).

[0098] 6. Glycosylated SAgs and SAgs Conjugated to Glycosylceramides, Lipopolysaccharides, Glycans and Lipoarabinomannans: Presentation on CD1 Receptors for Activation of T or NKT Cells and Differentiation to Tumor Specific Effector Cells

[0099] In a tumor cell or accessory cell, nucleic acid signal sequences are integrated into nucleic acids encoding the SAg molecules in order to route them to the Golgi apparatus and endoplasmic reticulum of tumor cells where they are glycosylated via appropriate glycosyltransferases (precedents from the selective transferases used to produce monogalactosylceramide in the Sphingomonas paucimobilis) to produce a proteoglycan with structural similarity to LPS, lipoteichoic acid, GalCer, a Gal, Streptococcus capsular polysaccharide. This construct is then secreted as an immunogenic “ground substance.” Alternatively, the resulting SAg glycolipid is anchored to the membrane, expressed on the cell surface and routed specifically to CD1 receptors.

[0100] SAgs which are glycosylated by the above intracellular processes have improved capacity to bind surface structures such as mannose receptors, ganglioside receptors and CD1 receptors. Generally, the nucleic acids encoding a SAg are modified to include a signal sequence for routing to the Golgi apparatus and a core sequence which initiates glycosylation. It is important that the Vβ TCR binding region is not blocked by the added carbohydrate modifications. For example, an N-linked glycosylation site (in the sequence Asn X Ser/Thr where X is any residue except Pro) is engineered into SAg-encoding acid sequences which do not functionally interfere with TCR binding and activation. The nucleic acid encoding these signal sequences and core binding glycosylation sites of SAgs are fused to nucleic acids encoding SAg and the fusion gene used to transfect tumor cells of a host. In addition, glycosylated forms of SAgs are expressed in a heterologous eukaryotic expression system such as yeast cells or baculovirus-infected insect cells. In gram negative bacteria (such as E. coli), nucleic acids encoding SAgs are fused to nucleic acids encoding LPS's, in gram positive bacteria (such as Staphylococcus or Streptococcus), to nucleic acids encoding capsular polysaccharides and teichoic acids and in mycobacterial species to nucleic acids encoding lipoarabinan.

[0101] The gram negative bacterium Sphingomonas paucimobilis produces the monogalactosylceramide. In this bacterium, nucleic acids encoding SAgs (containing serine) are fused to nucleic acids encoding and directing the synthesis of glycosylceramides and monogalactosylceramide in particular. The resulting galactosylceramide-SAgs are powerful T cell stimulants. The same procedure is followed in bacteria which naturally produce LPS's such as E. coli, Salmonella or Klebsiella or for bacteria which naturally produce lipoarabinomannans glycans or polysaccharides containing cell walls such as mycobacterium and streptococcus respectively. The SAg-polysaccharide constructs bind to CD1 receptors of antigen presenting cells. They are then capable of activating NKT cells either in vivo or ex vivo to become tumor specific effector cells in response to IL-12.

[0102] SAgs are also conjugated genetically or biochemically as in Example 5 to LPS's via a natural high affinity binding site for LPS binding protein (LPB). Once bound, the SAg catalyzes the binding of LPS monomers to CD14 and CD1 receptors in a fashion similar to that of LPB. In this way, the conjugates are capable of activating T cells for use in vivo or ex vivo for adoptive immunotherapy while preserving the anti-apoptotic effect of LPS on SAg activated T cells. Examples of their preparation and use in vivo and in vitro are given in Examples 4, 7, 15, 16, 18-23.

[0103] In addition, SAgs similarly conjugated to lipoarabinomannans and glycans are integrated into lymphomonocytic cell membranes via glycosylphosphatidylinositol anchors. These SAg-lipoarabinomannan complexes are expressed or secreted by antigen presenting cells or tumor cells. They are also bound to CD1, mannose or class II receptors in which form they are used to activate T or NKT cells. These constructs are administered in vivo or they are used ex vivo to produce tumor specific effector cell populations (T cell or NKT cells) which are employed for adoptive immunotherapy of cancer (Examples 5, 15-16, 18-23).

[0104] Mannose receptor expression is upregulated by cytokines. For example, accessory cells including DCs, and tumor cells express mannose receptors on their surfaces after GM-CSF treatment. SAgs are bound to mannose receptors by transfecting cells with nucleic acids encoding SAg which also consist of nucleic acids encoding signal sequences and glycosylation sites which, in the presence of appropriate glycosyltransferases, produce mannosylated SAgs. These preferentially bind to mannose receptors. In addition, glycosylated SAgs bind to amphipathic cell surface gangliosides and glycolipids via hydrophobic interactions. These glycosylated SAgs presented in a form bound to mannose receptors are capable of activating T cells and NKT cell populations. They are used either in vivo by direct administration or ex vivo to produce a tumor specific effector cell population (T cell or NKT cells) for use in adoptive immunotherapy of cancer (Examples 4, 5, 15, 16, 18-23).

[0105] 7. SAgs Conjugated to Glycosylceramides Gangliosides and Verotoxins (VT)

[0106] Amphipathic gangliosides bound to tumor cell surfaces such as GD1, GD2, GD3, GM1, GM2, GM3, GQ1 and GT1 are capable of binding exogenous SAgs. The binding of a SAg to the surface of a tumor cell creates an immunogen on the tumor cell surface. Tumor cells transfected with nucleic acids encoding glycosyltransferases overexpress gangliosides, producing a greater surface density of ganglioside moieties available to bind exogenous SAgs. Enterotoxins bind to cell surface amphipathic gangliosides and/or glycophorins via their hydrophobic residues while preserving their T cell binding properties. SAgs are also glycosylated intracellularly by addition of a glycosylation site or by chemical conjugation of a carbohydrate moiety using methods well described in the art. In glycosylated or native form, the SAgs bind to surface ganglioside while retaining their T cell activating properties. Overexpression of the hydrophobic regions of the molecule promotes binding to the surface gangliosides (Example 5).

[0107] Examples from nature of exogenous proteins that bind to cell surface gangliosides include falciparum malarial merozoite which combines with gangliosides associated with the Duffy blood group and induce long standing and durable protection and tetanus toxin which binds to surface gangliosides with highest affinity for the disialyl groups linked to inner galactosyl residues.

[0108] Enterotoxin B contains a T cell activating sequence which is chemically cross-linked or polymerized using bifunctional agents such as carbodiimide, glutaraldehyde or formaldehyde by established methods well known in the art. These polymers are then bound to gangliosides expressed on tumor cells such as GD1, GD2, GQ1,GD3 or GM1, GM2, GM3, GT1. In monomeric or polymerized form, SAgs also bind to monogalactosylceramides which are free or bound to CD1 receptors on tumor cells or antigen presenting cells via hydrophobic interactions. The monogalactosylceramide binds to hydrophobic sequences on the SAg which are expressed at multiple sites on the molecule. In one embodiment, the lauroyl group [CH₃(CH)₁₀CO] or the group [CH₃(CH)₁₃CO] is covalently added to each of the peptide's amino terminus to serve as a of the CD1 receptor. The key SAg peptide sequence such as of SEB (amino acids 225-234) which confers T cell activating properties is tandemly repeated to various lengths prior to lipid conjugation.

[0109] Hydrophobic SAg peptides(such as Trp, Tyr, Phe, Leu, and Ile) are screened for binding to glycosylceramides immobilized on CD1 receptors or via adsorption chromatography with immobilized glycosylceramide. The SAg sequences with the greatest affinity for the CD1 receptor are selected for conjugation to the glycosylceramides and LPS's. Alternatively, the SAg sequence is screened for affinity for the CD1 or MHC class II receptor using a peptide phage display library as described in Examples 4. Likewise, pre-formed SAg-glycosylceramide or LPS complexes are also screened for affinity for the CD1 or MHC class II receptor (Example 4). These lipopeptide complexes are then screened for T cell proliferative activity and IL-12 production. The monomeric or polymerized SAg in native or glycosylated form binds to the monoglycosylceramides or gangliosides expressed on CD1 receptors on the tumor cell surface.

[0110] Therapeutic Construct: SAg-Glycosylceramide Conjugates

[0111] SAgs have an affinity for glycosphingolipids especially those with terminal or subterminal Gal(α1-4)Gal residues. Such residues are expressed on tumor cells as Gal(α1-4)Gal(62 1-4)GlcCeramide (globotriaosylceramide or Gb3) and Gal(α1-4)GalCeramide (galabiosylceramide or Gb2). Gb3 and Gb2 also known as CD77, Burkitt's lymphoma antigen, and the human blood group p^{k} antigen are the natural receptors for Shiga toxins and VT's. Shiga toxin, a 69-kDa complex of proteins comprised of five b-subunits (7 kDa each) and one a-subunit (30 kDa) has high affinity for the terminal digalactose of Gb3 or Gb2. Methods for their preparation and isolation are described in Example 41. Once bound to the tumor cell, these toxins are internalized and induce apoptosis.

[0112] The synthetic pathway for neutral glycosphingolipids in eukaryotic cells is known. Glucosylceramide (GlcCer) is the precursor of lactosylceramide (LacCer), which leads, in order, to Gb3 and globotetraosylceramide (Gb4). Different Golgi enzymes are responsible for addition of monosaccharides from nucleotide-sugar donors in each step of the pathway. Globotriaosylceramide synthase (UDP-galactose:lactosylceramide α1-4-galactosyltransferase) has been purified. In the cytoplasm, the a-subunit of the Shiga toxin or VT is processed by a trypsin-like cleavage. The “activated” 27-kDa a-subunit inactivates 60S ribosomes by depurination of a single nucleotide in 28S rRNA, rendering ribosomes incapable of carrying out peptide elongation.

[0113] The present invention provides therapeutically active soluble complexes comprising SAg and glycosphingolipids which have terminal or subterminal Gal(α1-4)Gal residues and Shiga toxin receptors Gb3 and Gb2, (collectively referred to as “GTSG1-4”). These complexes include but are not limited to SAg-GPI-GTSG1-4 complexes, and synthetic and functional derivatives thereof Such structures appear naturally on surfaces of certain tumor cells such as astrocytoma, Burkitt's lymphoma and ovarian carcinoma. Methods of preparing and isolating glycosylceramides and VTs are given in Examples 41 and 55.

[0114] SAgs also have a demonstrable affinity for galactosylceramides containing Gal(α1-4)Gal residues. Methods of assessing SAg binding to GTSG1-4 are provided given in Example 43. These conjugates are also shed from SAg-transfected tumor cells as binary complexes of SAg-GTSG1-4 or ternary complexes of SAg-GPI-GTSG1-4, in free form, as vesicles or as exosomes (see Sections 38 and Example 38). Methods of isolating and characterizing these shed complexes appear in Section 38 and Example 42. The complexes may also be prepared by chemical or genetic methods (Example 5). SAg-GTSG1-4 or SAg-GPI-GTSG1-4 complexes or exosomes are useful as a preventative vaccine or against established tumor. They are also useful in vivo by direct administration or ex vivo where they are loaded onto antigen presenting cells comprising CD1 or MHC receptors to activate NKT and T cells to produce tumor specific effector T or NKT cells for adoptive therapy of cancer (Examples 5, 7, 14, 15, 16, 18-23, 38).

[0115] Therapeutic Construct: Tumor Cells Expressing SAgs and Galactosylsylceramides

[0116] Additional immunogenic complexes comprising SAgs bound to tumor cells, DCs DC/tc constructs expressing surface Gb2 and Gb3 or other glycosphingolipids containing terminal Gal(α1-4)Gal are prepared by transfecting these cells with nucleic acids encoding a SAg. The transfected cell expresses the SAg in the context of the glycosphingolipid comprising the terminal or subterminal Gal(α1-4)Gal moiety. Alternatively, free or GPI linked glycolipids containing SAg peptides or polypeptides bind to tumor cells or accessory cells in tissue culture (Section 38). The expression of Gb3 and Gb2 on tumor cells is optionally upregulated by various cytokines, including IFNα and TNF α, before contacting the SAg

[0117] Tumor cells, accessory cells or fused tumor/accessory cells transfected with SAg which are not naturally endowed with the GalCer (optionally coupled to SAg) acquire these molecules in free or GPI-linked form from surrounding media or by transfer from liposomes or vesicles (exosomes) which express them (Section 38 and Example 5). The resulting cells, coexpress SAgs and glycosylceramides or other glycosylceramides capable of stimulating an effective T or NKT cell immune response. Multidrug resistant (MDR) tumor cells or cell lines which naturally accumulate and express intracellular glycosylceramides are useful in this invention. MDR agonists such as SDA PSC 833, a cyclosporin analogue, and fumonisin B1, a ceramide synthase inhibitor, are employed to induce ceramide accumulation in MDR cells (Example 45). Tumor cells or accessory cells which overexpress key glycosylceramides due to transfection with a1-2, α1-4, α1-6 glycosyltransferases (Example 38) or a natural or induced deficiency of α-galactosidase are also useful. In addition, tumor cells with high concentrations of GalCer expressed on their surface or that of accessory cells are generated by incubation with ceramides containing a 2-hydroxy fatty acid C60H. Tumor cells selectively convert them to GalCer, galabiosylceramide and sulfatide in the trans-Golgi network where they are sorted and transported selectively to the cell surface. Methods for this selective biosynthesis of GalCer with hydroxy fatty acids are in Example 46.

[0118] These fused SAg-tumor cell/accessory cell constructs are used to activate a T or NKT cell population. They are used in vivo by direct administration or ex vivo to produce a population of tumor specific effector cells (T cells or NKT cells) for adoptive therapy of cancer (Examples 5, 7, 14, 15, 16, 18-23, 38).

[0119] SAg-VT Conjugates to Induce Tumor Cell Apoptosis

[0120] The present invention contemplates the induction of apoptosis in tumor cells expressing Gb2 and Gb3 (or other glycosphingolipids containing terminal Gal(α1-4)Gal) by using free SAgs, conjugates and fused DNA that comprises SAg, SAg peptide or SAg-encoding DNA fused to intact VT or to VT A or B chains. Preparation of these conjugates and fusion proteins from their corresponding DNA, polypeptides or functional derivatives is provided in Examples 1 and 5. These conjugates induce apoptosis by binding to tumor cell glycosphingolipid receptors having terminal Gal(α1-4)Gal. Methods of assessing tumor cell apoptosis are in Example 44. CD19 or IFNa peptide sequences and generic carbohydrate recognition domains which bind Gal(α1-4)Gal structures are also useful. CD19, a B-cell restricted differentiation antigen, naturally binds to Gb3 and Gb2 on the cell surface which incudes apoptosis. CD19 has VT-like sequences in the N-terminal extracellular domain (NBRF protein data bank) that have 41%, 34% and 37% sequence identity to VT1, VT2, and VT2e B subunits, respectively. When compared to a consensus VT B sequence, the CD19 sequences show 49% identity. Binding of these peptide sequences to membrane Gal(α1-4)Gal-containing glycolipids facilitates receptor mediated induction of apoptosis.

[0121] The IFNa α receptor has a 63-kDa extracellular peptide with regions of amino acid identity to domains in the VT B subunit implicated as Gb2/Gb3 binding sites. The preferred targets of the above conjugates on tumor cells are the naturally expressed Shiga toxin receptors Gb3 and Gb2 with a terminal Gal(α1-4)Gal. Astrocytomas and Burkitt's lymphomas are the preferred tumors as they naturally express glycosphingolipid receptors. However, any tumor expressing the appropriate receptor is appropriate. Tumor cells which express either engineered or natural functional derivatives, or mutants of these glycosphingolipid receptors, are also useful. Receptor expression on the target cells is optionally upregulated by cytokines such as IFNγ and TNFα. Tumor cell sensitivity to the cytotoxic effects of a VT is enhanced by administration of interleukin-1β before the addition of the conjugates. Tumor cells which do not naturally display Gb3 or Gb2 acquire these structures by transfer from free, soluble structures or liposomes which express the missing glycosphingolipid receptor (Section 38, Example 5). The reconstituted tumor cells bearing the appropriate glycolipid receptors are thus targeted for apoptosis by the above constructs and conjugates.

[0122] SAg Nucleic Acid-Verotoxin Conjugate

[0123] A preferred construct is the SAg-VT conjugate wherein the SAg is preferably in nucleic acid form (prepared according to Example 3). The VT portion of the complex (SEQ ID NOS:27-28) binds to the tumor cell and initiates apoptosis. The VT also acts as a “vector” for transfer of the SAg nucleic acid into the cell. SAg-VT conjugates bind to the terminal Gal(a1-4)Gal receptors on tumor cell surfaces and are internalized via endocytosis. The SAg nucleic acid is internalized together with the VT. The VT A chain is an RNA N-glycosidase acting on the 60S ribosomal subunit. It induces apoptosis in the tumor cell by removing an adenine base on amino acyl-transfer RNA so that peptide chain elongation is blocked. The resulting apoptotic tumor cells contain the internalized SAg nucleic acid and are then ingested by dendritic cells. The DCs are cross primed to induce an effective anti-tumor response by presenting the tumor associated antigens in the class I pathway to T cells while the SAg nucleic acid expresses SAg polypeptide. These activated DCs or DC/tc hybrids can be prepared by the methods of Examples 28-29. They are used to activate a T or NKT cell population in vivo as a preventative vaccine or by direct administration against established tumor. They are also used ex vivo to produce a population of tumor specific effector cells (T cells or NKT cells) for adoptive therapy of cancer (Examples 5, 7, 14, 15, 16, 18-23, 28-29).

[0124] Glycosylation or lipid binding of the enterotoxin does not interfere with T cell binding and activating properties. The SAg is glycosylated by chemical or recombinant techniques described in the Examples 4. The SAg glycoprotein is the further conjugated to gangliosides in the ganglioside synthetic pathway via the presence of key signal peptides on the glyco-SAg (Example 4).

[0125] The SAg is also rerouted to the LAMP pathway, glycosylated in the Golgi apparatus and the endoplasmic reticulum and then translocated to the membrane class II receptor as a glycosylated ganglioside. Gangliosides are glycosylated to form glycosylceramides by recombinant techniques as described in the Example 4. They are also glycosylated by glycosyltransferases to form homologues which bind to hydrophobic regions of the SAg peptide. The final products namely SAg-glycosylceramides or SAg-LPS's then bind to CD1 receptors and are used to activate T cells or NKT cells. These construct are administered directly vivo or they are useful ex vivo to produce a population of tumor specific effector T cells or NKT cells for adoptive immunotherapy of cancer by protocols given in Examples 7, 15, 16, 18-23).

[0126] The present invention contemplates the fusion or coexpression within the same cell of SAg polypeptides with anomeric mono and digalactosylceramides which are expressed within a tumor cell or on the tumor cell surface. These construct could also be effectively expressed on the surface of accessory cells defined in Oxford Dictionary of Biochemistry and Molecular Biology 1997 edition as any one of various types of cell which assist in the immune response cell and includes but is not limited to DCs, fibroblasts, synoviocytes, astrocytes antigen presenting cells, neutrophils, macrophages, basophils, eosinophils, mast cells, keratinocytes and platelets, as well as fusion cells comprising accessory cells and tumor cells.

[0127] The anomeric mono and digalactosylceramides have been shown to activate NKT cells and to produce an anti-tumor response in the context of IL-12. The galactosyl ceramides have several structural requirements in order to produce anti-tumor effects. 12. Mono and digalactosylceramides require an anomeric galactose or glucose as the terminal sugar or inner sugar as for example anomeric 1,6-digalactosylceramide, -anomeric 1,2-digalactosylceramide, anomeric 1,4-digalactosylceramide, a diglycosylceramide wherein the inner sugar is an anomeric galactose or an anomeric glucose and anomeric galactosyl or anomeric glucosyl ceramide. In addition, the 3- and 4-hydoxyl groups on the phytosphingosine portion of the ceramides are preferably unsubstituted, the sphingosine base length is preferably from about 10 to about 13 carbon units and the fatty acyl chain length is preferably in the range of about 12 to about 24 for optimal anti-tumor effectiveness of the molecule.

[0128] The expression of anomeric mono- and digalactosylceramides in a cell is achieved by several methods. The first involves the transfection and amplification of nucleic acid encoding the enzymes which synthesize the anomeric 1,4-, the anomeric 1,6- or the anomeric 1,2,- mono- and digalactosylceramides such that these glycolipids are overproduced. The genes for these transferase enzymes have been cloned. Transfection of nucleic acid encoding these terminal transferases into the above cells is carried out in vivo by the methods described in Example 1.

[0129] A second method for creating cells that overexpress the foregoing glycolipids uses monensin or brefeldin which block additional glycosylation and sialylation of the -galactosylceramides, so that the mono- and digalactosylceramides accumulate in the cell. A third approach employs cells from patients with Fabry's disease. These cells are genetically deficient in the -galactosidase so they naturally accumulate -galactosylceramides. In a forth technique, an -galactosidase deficiency is induced in the target cell so that -galactosylceramides accumulate. In a fifth approach, the -galactosyltransferase is transfected Fabry's disease cells, thereby adding to the usual accumulation due to the catabolic enzyme deficiency. Such cells should have massive accumulations of -galactosylceramides. In a sixth approach, the desired mono- or diglycosylceramide expressed on liposome surfaces are transferred to tumor cells lacking these structures by co-culture and employment of fusion techniques given in example 5.

[0130] Nucleic acids encoding SAgs are transfected into the above cells which are overexpressing, overproducing or otherwise accumulating mono and digalactosylceramides. The Golgi apparatus (or Golgi complex) is a major site of synthesis of the foregoing glycolipids. In the present context, the SAg combines with it the mono and digalactosylceramides. From the Golgi, the SAg-galactosylceramide conjugates or complexes, with the appropriate sorting signals, are dispatched in transport vesicles to other destinations. For a SAg peptide to combine effectively with an -galactosylceramide, the peptide must first have the appropriate sorting signal which directs it to the Golgi, and from there, after complexing with the glycolipid, to the cell surface. The trafficking pathway of SAg polypeptide from the ER to the Golgi does not require special signals. SAg polypeptides that enter the ER (and fold and assembles properly) will automatically be transported through the Golgi apparatus to the cell surface unless they carry signals that either detain them in an earlier compartment en route or divert them (via the Golgi apparatus) to lysosomes or secretory vesicles. The SAg-glucosylceramide conjugates are routed from the Golgi to the cell surface after acquiring a structure like a cytoplasmic tail such as phosphoinositol which assures that these molecules will be bound in the cell membrane. The conjugates may also be routed to CD1 or MHC class I receptors, or via, the class II pathway, to MHC class II receptors by associating with invariant chain or LAMP-1 signals as described in Section 8.

[0131] The mono- and digalactosylceramides are capable of stimulating NKT cells (via an invariant chain) in the presence of IL-12 to produce an anti-tumor response. SAgs are capable of stimulating a T cell-dependent anti-tumor response.

[0132] The present invention utilizes tumor cells, accessory cells or hybrid cells such as DC/tc, engineered to express SAg-galactosylceramide for anti-tumor therapy. These cells may be administered as a preventative or therapeutic vaccine (Example 29). Alternatively, they may be useful ex vivo to activate an NKT or T cell population for use in adoptive immunotherapy of cancer (Example 29).

[0133] 8. SAg Targeting to Lysosomes

[0134] LAMP-1 is a transmembrane protein localized predominantly to lysosomes and late endosomes. The cytoplasmic domain of LAMP-1 contains the amino acid sequence (SEQ ID NO:29) Tyr-Gln-Thr-Ile whose structure conforms to the Tyr-Xaa-Xaa hydrophobic amino acid motif that mediates cell membrane internalization and possibly lysosomal targeting of several surface receptors. The intracellular targeting of LAMP-1 is controlled by the (SEQ ID NO:29) Tyr-Gln-Thr-Ile motif located at the C terminus of its cytoplasmic tail.

[0135] In the present invention, nucleic acid encoding a SAg is fused with nucleic acids encoding the transmembrane and cytoplasmic tail of LAMP-1. Nucleic acids encoding the signal peptide (N terminal) of LAMP-1 are integrated into this chimeric construct. These chimeric SAg/LAMP-1 polypeptides are targeted to endosomal and lysosomal compartments, thereby rerouting transfected SAg polypeptides into the MHC class II processing pathway. Thus, cells such as tumor cells transfected with nucleic acid encoding this modified SAg preferentially target the SAg to lysosomal compartments and are presented to T cells in the context of MHC class II. MHC class II negative tumor cells are also transfected with nucleic acid encoding MHC class II molecules. The association of SAgs with MHC class II molecules, their natural ligands on APCs, produce optimal T cell activation to the tumor. Antigen presenting cells transfected with these constructs are capable of inducing potent activation of T cells. Tumor cells, in particular, transfected with this construct are administered directly in vivo or used ex vivo to sensitize a T cell population which is useful in adoptive immunotherapy of cancer by protocols described in Example 16, 18-23).

[0136] 10. SAg Receptors

[0137] It is clear that certain tissues express receptors for enterotoxins that are not MHC class II and that binding is reserved for selected enterotoxins and not others. Non MHC cell II binding has been reported for colon carcinoma, mast cells epithelial cells and B cells. In a tumor bearing patient, it is desirable for administered SAgs to target tumor cells in vivo. which naturally express enterotoxin binding sites or receptors. Natural ligands for these receptors are native enterotoxins. However, because of the existence of naturally occurring enterotoxin specific antibodies in the circulation, native enterotoxins are incapable of binding target tumor cell or T cells. The isolated receptor is used to screen and identify SAg proteins and/or nucleic acids which bind to the native or chimeric receptor. SAg constructs are produced which target the tumor via its SAg receptor while also retaining T cell activating properties. In addition, T cells or NKT cells from tumor bearing patients are anergized in the course of tumor growth and are incapable of being used as a source of T cells for ex vivo stimulation and adoptive immunotherapy. After transfecting these cells with nucleic acids encoding enterotoxin receptors, they are capable of responding to exogenous enterotoxins and are once again a source of T cells useful in adoptive immunotherapy of cancer by protocols given in Examples 8, 9, 12, 16, 18-23.

[0138] Methods for receptor isolation purification and retrieval of cDNA are given in Example 12. The nucleic acids encoding SAg receptors are transfected into cells by methods given in Example 1 Tumor cells have a natural binding site for exogenously administered SAg polypeptides. In addition, nucleic acid encoding the SAg receptors are transfected into T cells, NKT cells, or γ/δ T cells of cancer patients which have been anergized in the course of tumor growth. The expression of the SAg receptor permits these cells to proliferate and produce TH1 cytokines in response to exogenous native SAg, Hence, these autologous T cell populations are useful in adoptive immunotherapy. Likewise, accessory cells are transfected with SAg receptor genes and used ex vivo to present SAg to T cells. Further, the nucleic acid encoding the SAg receptor is transfected into T cells and fused, in frame, to the nucleic acid encoding the TCR-associated zeta chain or the IL-2 g to produce a chimeric receptor capable of generating a signal for cell proliferation and the release of TH1 cytokines after binding its natural ligand exogenous SAg.

[0139] In one embodiment, the enterotoxin receptor is immobilized as in Example 12 and used to screen oligonucleotide libraries for binding (Gold L. J. Biol. Chem. 270:13581-13584 (1995)). Avidly binding oligonucleotides are used to mimic the native enterotoxin by targeting the receptor in vivo. They are coupled to the TCR binding site of an enterotoxin peptide. In this way, the hybrid molecule is administered to the patient in a form protected from circulating enterotoxin-specific antibodies. Additionally, a nucleic acid molecule is prepared which mimics the enterotoxin in its ability to bind to the enterotoxin receptor on tumor cells and to the TCR on T cells. This nucleic acid mimicking the native enterotoxin is administered to the tumor bearing patients and is capable of targeting the enterotoxin receptor sites on tumor cell and the TCR without being eliminated by circulating enterotoxin specific antibodies as in Example 13, 18, 20-23.

[0140] 11 . Tumor Cells that Express SAgs and the αGal Epitope

[0141] Tumor cells are for the large part weakly antigenic and poorly recognized by the immune system, various attempts to increase the immunogenicity of tumor cells by transfection of various cytokines or histocompatibility antigens have for the most part been unsuccessful. Hyperacute rejection of xenografted organs is a very rapid and dramatic immune event often occurring within minutes of vascularization of the xenografted organs. Very recently, a major antigenic system on xenografts which is the target of this reaction has been identified as αGalβ1-3Galb β1-4GlcNAc or αGal. This epitope is expressed in the tissues of pigs, guinea pigs, rodents, dogs, and cows but has not been detected in human tissue. The present invention improves the antigenicity of tumor cells and their recognition by the immune system by providing the αGal epitope on the cell surface either alone or together with SAg expression.

[0142] The a αGal epitope is expressed by endothelial cells in xenografts such as pig organs is a major antigenic target causing hyperacute organ rejection in human transplant patients. This hyperacute rejection appears to involve a complement dependent mechanism that occurs within a few minutes. An α1-3-galactosyltransferase, is an enzyme capable of producing α1-3-galactose-β1-4-N-acetylglucosamine moiety by adding a terminal galactose residue to a subterminal galactose residue via an α1-3 linkage. In addition, the α1-3-galactosyltransferase is not expressed by human and certain primate cells. Humans contain xenoreactive natural antibodies that recognize αGal. For example, anti-Gal antibodies bind to pig endothelial cells that express the Gal epitope. These anti-Gal antibodies are naturally occurring IgM antibodies recently found to be present in large amounts in human serum. Surface expression of the αGal epitope on tumor cells is achieved by transfecting a cell with a cDNA clone encoding the α1-3-galactosyltransferase. While tumor cells are the preferred cells for transfection, other cells such as accessory cells or immunocytes are also contemplated as being within the scope of this invention.

[0143] Nucleic acids encoding α1-3-galactosyltransferase polypeptides are known (Sandrin, M S et al., Proc. Natl. Acd. Sci. USA 90: 11391-11395 (1993)). A cDNA clone encoding murine α1-3-galactosyltransferase is prepared using the known sequence of this protein and the polymerase chain reaction (PCR) technique (Dabrowski, P L et al., Transplant. Proc. 26: 1335-1337 (1994). Briefly, two oligonucleotide primers are synthesized: (SEQ ID NO:30) 5′-GAATTCAAGCTTATGATCACTATGCTTCAAG-3′, which is a sense primer that encodes the first 6 amino acids of the mature α1-3-galactosyltransferase and contains an HindIII restriction site; and (SEQ ID NO:31) 5′-GAATTCCTGCAGTCAGACATTATTCTAAC-3′, which is an anti-sense primer that encodes the last 5 amino acids of the premature α1-3-galactosyitransferase and contains an in-frame termination codon and PstI restriction site. These primers amplify a 1185 bp fragment from a C57BL/6 spleen cell cDNA library that is subsequently purified, digested with HindIII and PstI (Pharmacia LKB) restriction endonucleases, and directionally cloned into HindIII/Pst I-digested expression vector such as CDM8 vector. After verifying the correct sequence, the α1-3-galactosyltransferase-containing expression vector is transfected into heterologous cells such as COS cells to confirm activity. Activity can be confirmed by testing transfected cells for αGal expression using the IB4 lectin (Sigma) of Griffonia simplicifolia that binds to Gal residues.

[0144] In the preferred mode, cells transfected with nucleic acids encoding a SAg are co-transfected with nucleic acids that encode an α-galactosyltransferase. Alternatively, nucleic acids encoding the transferase are transfected into a separate cell population which is coadministered with the SAg transfected cell population.

[0145] The SAg-encoding nucleic acid can be transfected into cells which already express αGal epitope. In addition, any cell can be transfected with the -galactosyltransferase-encoding nucleic acid. For example, αGal-negative human tumor cells or tumor cell lines such as melanoma or adenocarcinoma are transfected with nucleic acid encoding the α-galactosyltransferase. Tumor cells transfected with -galactosyltransferase-encoding nucleic acid express the αGal on their surface and are rapidly rejected when administered to a host with preexisting αGal specific antibodies. Methods of transfection are given in Example 1.

[0146] Human tumor cells expressing the αGal epitope after transfection, become strongly reactive with human serum containing preexisting antibodies to the αGal epitope. Thus, an αGal-expressing tumor cell is rejected after implantation.

[0147] The ability of αGal-transfected tumor cells to induce rejection is demonstrated by implantation into severely compromised immune deficient (SCID) mice that have been reconstituted with human T and B cells and transfused with normal human plasma containing the naturally occurring human antibodies specific for the αGal epitope. In this case, tumor cells transfected with -galactosyltransferase-encoding nucleic acid is rejected while untransfected cells are not. Similarly, tumor cells transfected with α-galactosyltransferase-encoding nucleic acid is rejected when implanted into species such as humans which synthesize antibodies to the αGal epitope compared to untransfected control tumor cells that are unaffected by the treatment.

[0148] For example, pretreatment with 10⁵-10⁷ α-galactosyltransferase transfected tumor cells subcutaneously followed by implantation of untransfected tumor cells prevents the outgrowth of untransfected malignant tumor cells. Hence, the -galactosyltransferase transfected tumor cells function as a vaccine. Further, -galactosyltransferase transfected cells implanted into animals after untransfected tumors are established induce rejection of an established untransfected tumor.

[0149] To test for the presence of αGal on a cell surface, α1-3 galactosyltransferase knockout mice that do not express the αGal antigen are used. The α1-3 galactosyltransferase knockout mice are described elsewhere (Tearle et al., Transplantation 61:13-19 (1996) and Shinkel et al., Transplantation 64:197-204 (1997)). A syngeneic tumor cell that is αGal negative such as B16 melanoma variants is transfected with nucleic acids that encode a given carbohydrate modifying enzyme. These transfected cells are then implanted into the knockout mouse that received plasma containing αGal specific antibodies. Tumors do not grow in animals containing αGal specific antibodies if the αGal epitope is expressed.

[0150] Thus, hosts implanted with αGal positive tumor cells exhibit less growth than those exhibited in hosts implanted with tumor cells that are αGal negative.

[0151] αGal negative transgenic animals are prepared which are useful for testing Gal expressing tumors. To produce these animals, nucleic acids encoding αGal fucosyltransferase are transfected into αGal positive mice. The fucosyltransferase dominates the usage of substrate N-acetyllactosamine and precludes -galactosyltransferase from utilizing this substrate. The transgenic mice do not express a-Gal on the cell surface. In this way, transgenic mice with the H antigen rather than the Gal antigen develop. Transgenic guinea pigs producing minimal αGal are also created in this way. These animals are used as models for testing their capacity to reject syngeneic αGal positive tumors. These systems also permit the testing of αGal specific antibodies for anti-tumor effects after they are passively infused into animals bearing Gal positive tumors.

[0152] Neuroblastoma and some melanoma cells overexpress several disialogangliosides, for example, GD2 and GD3. In the present invention, nucleic acid-encoding specific sialidases or glucosidases or neuraminidases that cleave terminal sialic acid or carbohydrate residues are transfected into cells that then express or overexpress a ganglioside with an exposed αGal epitope.

[0153] Fucosylated glycolipids such as B group antigens, Lewis blood group antigens, and L-selectin ligands are converted to the αGal epitope using the appropriate sialidases and glycosyltransferase enzymes. For example, a desialylating enzyme is introduced into B group antigen expressing cells such that the α-1-3-linked galactose is exposed and now recognized by αGal antibodies. Mild acid treatment to remove the branching fucose residues on the fucosylated B antigen is used to expose the α1,3galactose residues. Alternatively, cells expressing the B antigen or selectin antigen are transfected with -galactosyltransferase-encoding nucleic acid that competes successfully with fucosyltransferases for N-acetyl-lactosamine substrate and preferentially expresses the αGal epitope.

[0154] Nucleic acid encoding other polypeptides are also used to produce the surface expression of the αGal epitope such as nucleic acid encoding glycosidases that specifically cleave carbohydrate residues to expose the αGal epitope. Tumor cells transfected with nucleic acids encoding N-acetyl-glucosaminyl transferase show an increased tendency to metastasize and colonize new organs. These same tumor cells are cotransfected with nucleic acids encoding SAgs, Staphylococcal hyaluronidase and erythrogenic toxins as well as Streptococcal capsular polysaccharide which enables them to secrete enzymes and toxins locally inducing a potent inflammatory and immune response at metastatic sites.

[0155] Co-transfection of tumor cells with nucleic acid encoding SAg and nucleic acid encoding a galactosyltransferase, sialidase, and/or glycosyltransferase results in expression of SAg, GalCer, αGal, or other glycolipids on the cell surface. These tumor cells are used to stimulate T or NKT cells ex vivo to produce a population of tumor specific effector cells which are deployed for adoptive immunotherapy of cancer.

[0156] Mutation of the glycosyltransferase nucleic acid in tumor cells produces a specific LPS containing the Gal/Cer or the Gal which coordinated with genes for protein glycosylation produce the desired integrated SAg LPS.

[0157] 13. Tumor Cells Expressing SAgs Glycosylceramides and LPS's and their Receptors

[0158] It appears that anti-tumor responses are produced by a subpopulation of T cells known as NKT cells. These cells recognize glycosylceramides with certain specifications which are presented in the context of CD1 receptors on antigen presenting cells. They produce IL-12 mediated anti-tumor responses. Peptides of certain length with hydrophobic sequences have been shown to react with various hydrophobic regions of the CD1 receptor and produce an immune response. However, these peptides have not been implicated in an anti-tumor response. In the present invention, lipoproteins are contemplated which consist of SAg or their major bioreactive domains fused to glycosylceramides in the context of the CD1 receptor.

[0159] To make this construct, CD1 positive cells are transfected with nucleic acids encoding glycosyltransferases that result in GalCer or GicCer expression on the cell surface and preferably in the context of the CD1 receptor. The appropriate glycosyltransferase nucleic acid is obtained from Sphingomonas paucimobilis or Agelas mauritianus which are known to express the GalCer on their cell surface. The GalCer and GicCer moieties are recognized by NKT cell Vα invariant chains in the context of CD1 receptors on antigen presenting cells. CD1 positive cells are cotransfected with nucleic acids encoding SAgs The resulting CD1 positive cells coexpress both GalCer and SAg on the cell surface or in the context of CD1. The GalCer and SAg presented simultaneously as a complex and/or separate from each other on the cell surface, in the context of CD1 produces potent activation of NKT cells due to recognition of SAg by NKT cell Vb chain and GalCer by the Va invariant chain. Such GalCer-SAg complexes are loaded onto the CD1 receptor and presented to NKT cells in this fashion. A SAg peptide capable of binding to the TCR and activating the T cell is useful for coupling to the GalCer before or after it is positioned on the CD1 receptor. (See Examples 1-4, 5).

[0160] CD1 positive antigen presenting cells or tumor cells bearing the SAg glycosylceramide are used to stimulate a population of NKT cells ex vivo which is then useful in adoptive immunotherapy of cancer by protocols given in Examples 7, 15, 16, 18-23). They are also useful when administered directly in vivo to tumor bearing patients to produce an anti-tumor response. (See Examples 18-23).

[0161] In the present invention, nucleic acids encoding the CD1 receptor are transfected into tumor cells in vivo or ex vivo. Martin L H. et al. Proc. Natl. Acad. Sci. USA 83: 9154-9158 (1986). Nucleic acids encoding the CD1 receptor are also cotransfected into tumor cells with nucleic acids encoding the SAg receptor. A tumor cell expressing a chimeric receptor comprising sequences of CD1 and SAg receptors is also produced by transfection of fusion nucleic acids encoding both receptors. The transfected tumor cell expresses either dual or chimeric receptors which bind SAg and GalCer independently or as fusion protein or conjugate. Likewise, tumor cells are transfected with nucleic acids encoding CD14, the LPS receptor, (Ferrero, E. et al., J. Immunol. 145: 331-336 (1990)) a leucine rich receptor glycoprotein found on myeloid cells with a LPS binding site between amino acids 57-64. Nucleic acids encoding CD14 are transfected into tumor cells together with nucleic acids encoding SAgs and resulting tumor cell expresses several receptors or a single chimeric receptor with preserved consensus binding sequences common to each. These tumor cell transfectants are capable of binding exogenous SAg and/or LPS and or GalCer. The resulting tumor cells with bound SAg, and/or Gal/Cer and/or LPS activate a population of T cells and/or NKT cell to produce tumor specific effector cell which are useful in the adoptive immunotherapy of cancer by methods in Example 1-7, 12, 15, 16, 18-23). The tumor cell transfectants are also administered as a vaccine or to hosts with established tumors as in Example 19-23.

[0162] Alternative splicing and utilization of cryptic splice sites generates alternative reading frames and secretory isoforms of CD1, CD14 and SAg receptors. Woolfson A. et al., Proc. Natl. Acad. Sci. USA 91: 6683-6687 (1994). These soluble receptors are immobilized on solid surfaces such as polystyrene plates or beads and bind their respective ligands e.g. GalCer and SAg. In this form, the GalCer and SAgs activate T cell or NKT cell to produce a population of tumor specific effector T cell or NKT cells useful in adoptive immunotherapy of cancer by methods given in Examples 7, 15, 16, 18-23).

[0163] 14. SAg-Activated Tumor Specific T Cells, NKT Cells or g/d T Cells Expressing CD44 for Adoptive Immunotherapy

[0164] It is imperative that T cells, NKT which are stimulated in vivo or ex vivo by the SAg constructs given herein are capable of trafficking and homing effectively to tumor sites. CD44 expression on T cells after SAg stimulation, is an indicator of upregulated adhesive capacity which is requisite for the homing of SAgs to tumor sites. T cells or NKT cells or cells transfected with nucleic acids encoding SAg receptors i.e. tumor cells or accessory cells are stimulated by SAgs in vivo or ex vivo to express CD44. These CD44 expressing T cells are enriched and expanded and then harvested for use in adoptive therapy of cancer by protocols given in Examples 7, 15, 16, 18-23).

[0165] Transfection of cDNAs encoding soluble isoforms of CD44 into tumor cells results in the local release of soluble CD44 which inhibits the ability of endogenous cell surface CD44 to bind and internalize hyaluronate and to mediate tumor cell invasion. Mice injected with tumor cell transfected with the CD44 isoform showed not tumor metastases. Such tumor cells were shown to undergo apoptosis. These transfectants displayed a marked reduction in their ability to internalize and degrade hyaluronate. Therefore, CD44 function promotes tumor cell survival in invaded tissues possible as a result of impairing their ability to penetrate the host tissue hyaluronan barrier. In the present invention, SAg-encoding nucleic acid is co-transfected or fused to nucleic acids encoding CD44 isoforms. These transfected cells are capable of migrating to sites of metastatic tumor in tumor bearing hosts and eliciting a potent anti-tumor response. The combined apoptotic effect to the CD44 isoform with the enhanced immunogenicity of the SAg produces a powerful synergistic anti-tumor response. The nucleic acids encoding the CD44 isoform and SAg are transfected into accessory (DC)/tumor cell hybrids. In addition, to presenting tumor antigen and SAg to the immune system and inhibiting metastases, the CD44 isoform produces apoptosis of the fusion cell which in turn is ingested by DCs resulting in enhanced immunogenicity and a more potent tumoricidal response. These combined transfectants are used preferably against established tumor according to protocols in Example 19-23.

[0166] NKT cells or T cells that do not produce CD44 after SAg stimulation do so after transfection with nucleic acids encoding CD44 or transferases such as N-acetylglucosaminyl transferase III or CD44 (Sheng, Y. et al., Int. J. Cancer 73, 850-858 (1997); Nottenberg, C. et al., Proc. Natl. Acad. Sci. USA 86: 8521-8525 (1992)).The latter enzyme synthesizes bisecting N-acetylglucosamine structures on asparagine linked oligosaccharides. Glycosylation of CD44 by these transferases produces enhanced CD44 mediated adhesion to immobilized hyaluronate. SAgs are used to activate T cells which have been transfected with nucleic acids encoding N-acetylglucosaminyltransferase III. The SAg stimulated transfectants display increased CD44-mediated adhesion, as well as lymphocyte homing and trafficking. Certain T cell, NKT cell or/T cell populations which are unable to express CD44 after SAg stimulation are transfected with nucleic acids encoding CD44 before sensitization with SAgs. These cells express CD44 after immunization with SAgs in vivo or in vitro. These additional populations of effector T cells are useful in adoptive immunotherapy of cancer by methods given in Examples 5, 7, 15, 16, 18-23.

[0167] 15. Tumor Associated Antigens

[0168] These include

[0169] (1) Normal structures, e.g., differentiation or tissue specific antigens,

[0170] (2) Mutated normal structures

[0171] (3) Products of alternate reading frame or fusion of several genes

[0172] (4) Chimeric products resulting from cell or gene fusion

[0173] (5) Xenogeneic antigens (“xenoantigens”)

[0174] A tumor antigen (also called “tumor associated antigen) is any antigenic structure expressed by a tumor cell. For example, tumor antigens include mutated products of various oncogenes and p53 genes that are expressed in tumor cells generally. Many tumor antigens associated with particular types of cancers are known. For example, tumor antigens associated with breast, colon, and lung cancer are known and have been cloned. Common melanoma antigens recognized by T lymphocytes have been identified and are used as immunotherapeutic antigens for treatment of melanoma. Five genes encoding different melanoma antigens have been identified. For example, MAGE1 and 3, expressed on melanoma and other tumor cells, are recognized by cytotoxic T lymphocytes (CTL) in the context of HLA-A1 (Van der Bruggen P et al., Science 254:1643 (1991) and Gauler B et al., J. Exp. Med. 179:921 (1994)). MART-1 identical to Melan-A (Kawakami et al., Proc. Natl. Acad. Sci. USA 91:3515 (1994) and Coulie et al., J. Exp. Med. 180:35 (1994)); gp100 (Kawakami et al., Proc. Natl. Acad. Sci. USA 91:6458 (1994)); and tyrosinase (Brichard et al., J. Exp. Med. 178:48 (1993)) are melanocyte lineage-related antigens expressed on both melanoma and melanocytes. MART-1 and gp100 have been shown to be recognized by MHC-class I-restricted CTL in the context of HLA-A2, and tyrosinase in the context of HLA-A2 and HLA-A24 [Robbins et al., Cancer Res. 54:3126 (1995)]. An additional list of tumor antigens useful in this invention is given in Rosenberg, S A. Principles and Applications of Biologic Therapy in Cancer: Principles and Practice of Oncology DeVita, V T., Hellman, S., Rosenberg, S. A., eds, J.B. Lippincott Co. Philadelphia, Pa. 1993.

[0175] In addition tumor associated antigens are defined as including normal structures expressed in tumor cells, mutated normal structures, normal differentiation- or tissue-specific structures, products of alternate reading frames of the same genetic regions, chimeric products of several genes that originated in a parental or in a fused, hybrid cell. This also includes gene products expressed in association with MHC molecules or other surface receptors, organelles or vesicles.

[0176] Tumor cells expressing tumor-associated antigens are transfected in vivo or ex vivo with nucleic acids encoding a SAg alone or together with nucleic acids encoding other products, such as those listed in Tables I and II. These include surface antigens and receptors such as the Gal epitope, GalCer, CD1, CD14 and SAg receptor.

[0177] The transfected cells may be of host origin, or syngeneic, allogeneic or xenogeneic; the cells may be non-malignant. SAg-encoding nucleic acid may also be inserted into a mutated normal gene in a tumor cell, e.g., LDL receptor gene in a melanoma cell. The LDL receptor is expressed as a fusion product of the LDL receptor gene (chromosome 19) and a fructose transferase gene on the same chromosome. This combination results from chromosome inversion which gives rise to the fusion product probably due to recombination between the two ends of this chromosome. The expressed peptide epitope is therefore a nonsense sequence being read in the wrong direction. The three base pair mutations in the third open reading frame results in the expression of a mutant peptide. Site directed mutagenesis can be achieved by insertion of SAg-encoding nucleic acid into the mutant gene at any feasible site or by targeting insertion in place of the mutated base pairs. The resultant LDL receptor displays the SAg alone or as a chimera with the mutant sequence. Site directed mutagenesis by SAg-encoding nucleic acid may also target the b-catenin gene which in melanoma shows a single C-T mutation which results in a ser to phe substitution and the generation of the 9 amino acid mutant peptide. The SAg-encoding acid may be inserted or may substitute for any sequence in a normal non-mutated gene, a tissue-specific or differentiation-associated gene in tumor cells, or other genes expressing their products in a tumor cell. Preferably, the mutated gene product is immunogenic and recognized as a dominant epitope by the host immune system, preferably by T cells (including tumor infiltrating lymphocytes). The mutated sequence may, in contrast, be a weak immunogen which is rendered more immunogenic when presented in the context of a SAg.

[0178] In the preferred embodiment, the transfected cells are tumor cells of host origin expressing a defined tumor associated antigen such as MART-1. If the tumor antigen is not expressed or weakly expressed on the transfected cells, then the tumor cell is transfected with nucleic acids encoding an immunogenic tumor antigen such as MART-1, tyrosinase or MAGE-1 in addition to SAg and other constructs described herein.

[0179] The tumor cells may be transfected in vivo by administering nucleic acids encoding SAgs and/or the other nucleic acid constructs described above using a site directed mutagenesis approach in vivo and methods such as described in Example 1, 3, 18-23. Tumor cells may also be transfected ex vivo by methods given in Example 1-3. Ex vivo transfected tumor cells are used as vaccine or to treat established tumor by methods and protocols in Example 18-23 They are also useful ex vivo to immunize T cells or NKT cells to produce a population of tumor specific effector cells adoptive immunotherapy of cancer by methods and protocols given in Examples 7, 15, 16, 18-23.

[0180] 16. Immunostimulatory Sequences

[0181] Several of constructs consist of nucleic acids encoding SAg peptides which produce anti-tumor responses by activating host TH-1 CD4+ T cells to proliferate and produce tumoricidal cytokines such as IL-1a, IL-1b, IL-2, IL-6, TNFa, TNFβ and IFNγ. The incorporation of the immunostimulatory sequence into the genetic construct of SAg DNA, ensures that the T cell response is skewed to produces a predominant proliferation of TH1 cells and production of a TH1 cytokine profile. Immunostimulatory sequences (ISS) consist of DNA sequences that exhibit immunogenicity. Briefly, plasmid DNA (pDNA) having short immunostimulatory DNA sequences containing a CpG dinucleotide in a particular base context were shown to be immunogenic (Tokunaga J et al., J. Natl. Cancer Inst. 72:955-962 (1984)). By synthesizing single stranded nucleotides corresponding to different regions in the Mycobacterium bovis genome, specific single stranded oligonucleotides that activate adherent splenocytes and enhanced natural killer cell activity have been identified. In addition, single stranded oligonucleotides with CpG motifs induce B cell proliferation and secretion of IL-6 and IFN (Krieg et al., Nature, 374:546 (1995)). The activation capability generally has the formula 5′-Pur-Pur-C-G-Pyr-Pyr-3′. Further, human monocytes transfected with pDNA or double stranded oligonucleotides containing ISS transcribed large amounts of IFNg and IL-12 (Sato et al., Science 273:352-354 (1996); Zhu et al., Science 261, 209-211, (1993)) Direct gene transfer with plasmid-cationic liposome complexes resulted in lasting, generalized or tissue specific expression of the injected genetic phenotype. Similarly, any RNA or DNA vectors carrying nucleic acids encoding SAg alone or associated with additional therapeutic nucleic acids which are enhanced by optimizing promoters, introns, and polyadenylation signals (Donnelly, J J et al. Annu. Rev. Immunol. 15: 617-648 (1997)) are also useful in augmenting expression of SAg and enhancing an anti-tumor effect.

[0182] In the present invention, the ISS is inserted into nucleic acid sequences of SAgs and tumor associated antigens which are used to transfect tumor cells, antigen presenting cells, accessory cells including muscle cells in vitro or in vivo by methods given in Example 1-3, 15, 16, 18-23. In all instances, the SAg stimulation of the T cell response is critical to an effective anti-tumor response of the host. The presence of the ISS ensures that the SAg nucleic acids preferentially activate the TH1 after in vivo administration of the nucleic acids encoding SAg. SAg DNA is useful ex vivo in activating T cells by direct transfection or by presentation via incubation with pretransfected antigen-presenting cells or tumor cells. The tumor specific T effector cell are then useful for adoptive therapy of cancer using protocols given in Examples 7, 15, 16, 18-23). A particularly useful method involves the intratumoral injection of nucleic acids encoding SAgs. The latter is administered in naked, plasmid or liposomal form. Once tumor inflammation is initiated (generally within 15 days after injection), the host is given T cells or NKT cells which have been immunized in vitro to the tumor by tumor cells transfected with nucleic acids encoding SAg plus additional constructs given in Tables 1 and II by methods given in Examples 7, 15 16 18-23.

[0183] 17. Liposomes

[0184] Liposomes containing repeating units of the Gal epitope, GalCer, and/or SAgs are constructed and administered directly into a tumor. These elements are combined before incorporation into liposomes or they are added individually in the preparative procedure. Methods for preparation of these liposomes are given in Examples 5. These liposomes are preferentially delivered parenterally or directly into the tumor. The administration of SAgs in this manner provides a high local concentration of SAg to stimulate an anti-tumor response. These liposomes are also useful ex vivo by activating a T cell or NK T cell population which is then harvested and used for adoptive immunotherapy as described in protocols in Examples 5, 7, 15-17, 18-23).

[0185] 18. Tumor Cells that Induce Cellulitis

[0186] Transfection with microbial nucleic acids that encode tissue spreading factor (hyaluronidase), erythrogenic toxins, enterotoxins; capsular polysaccharides from S. aureus and Streptococcus pyogenes, S. aureus and S. pyogenes have potent tissue invasive properties. Specifically, Staphylococcus and Streptococcus are capable of invading tissues by secreting several enzymes which lyse ground substance such as mucopolysaccharide, hyaluronic acid, or chondroitin sulfate, create local thrombosis, and initiate inflammation and edema. These enzymes consist of hyaluronidase, streptokinase, streptodomase, erythrogenic toxins as well as various enterotoxins (Example 3). In the present invention, the nucleic acid sequences encoding these potent enzymes are transfected into tumor cells, either in vitro or in vivo (Examples 1-3, 6, 15, 16, 18-23). In vivo, the transfected tumor cells migrate to sites of existing metastases. The transfected tumor cells secrete the enzymes which hydrolyze the tumor ground substance and neovasculature and toxins to induce inflammation and an immune response in tumor tissue. Tumors which are encased in nests of connective tissue are eliminated by this process. The resulting increase in local vascular permeability induced by the combined effect of enzymes and toxins produces intense inflammation at tumor sites. If their administration is timed to the peak of tumor inflammation, liposomes as described herein and chemotherapy are sequestered and concentrated in the inflamed tumor bed producing an augmentation of the tumoricidal response.

[0187] A relatively low number of transfected tumor cells with the complete microbial enzymatic and toxin genetic construct would be required to induce a tumoricidal effect. The population of transfectants would then proceed to secrete these microbial enzymes locally. In addition, nucleic acid encoding these enzymes are derived from a strain of Staphylococcus or Streptococcus such as Staphylococcus epidermidis or Streptococcus bovis of low or intermediate virulence.

[0188] Tumor cells are cotransfected with glycosyltransferases or treated with glycosyltransferase-inducing agents resulting in the expression of the Gal epitope and reduction in the survival time of tumor cells For example, the nucleic acids encoding the glycosyltransferase from Sphingomonas paucimobilis or Agelas mauritianus produce GalCer are transfected into tumor cells to induce the surface expression of GalCer or Gal. The tumor cells then express and/or secrete microbial agents such as SAgs, hyaluronidase and erythrogenic toxins that hydrolyze the ground substance of the tumor. By also displaying SAgs and -Gal or Gal/Cer epitopes which activate NKT cells, T cells, and Gal specific antibodies the transfected tumor cells induce profound tumoricidal activity. These transfected tumor cells are used to activate a population of T cells to become tumor specific effector cells which are employed for the adoptive immunotherapy of cancer. See Examples 1, 2, 4-5, 7, 15, 16, 18-23.

[0189] For in vivo transfection of tumor cells, the microbial genetic nucleic acids are targeted to tumor cells as described herein (See p. 12 “Transfection”, Examples 1-3, 6, 19). Once localized in tumor sites in vivo, the tumor cell is capable of hydrolyzing surrounding stroma and, initiating thrombosis, inflammation, and increased tissue permeability. Additional microbial nucleic acid encoding proteinases, lysoproteinases, tissue spreading factors, a and b hemolysins and toxins are also transfected into tumor cells and used in accordance with this invention.

[0190] Micrometastatic disease in cancer patients is of great concern as it often goes undetected and is refractory to chemotherapeutic agents. Documented metastases in breast cancer patients is associated with a poor prognosis. The present invention contemplates that the metastatic properties of tumor cells coupled with the potent inflammatory properties of the microbial products are useful in tracking and eliminating micrometastatic disease in tumor bearing patients. Tumor cells are transfected with nucleic acid encoding polypeptides involved in metastasis. These include but are not limited to peptides that upregulate the adhesive properties of CD44 (e.g., glycosyltransferases), the c-erbB-1 encoded EGF receptor which is associated with enhanced metastases in breast carcinomas or c-erbB-2/neu encoding the p185 receptor associated with poor prognosis in breast and ovarian carcinomas. These cells with metastatic activity are programmed to traffic, home and colonize specific sites of existing metastases the tumor bearing host. Hence they have the unique property of charting the micrometastatic sites of the tumor. These tumor cells are cotransfected with microbial nucleic acids encoding the hyaluronidase, erythrogenic toxin and enterotoxins as well as the Gal. Hence, as they colonize metastatic sites, these transfectants induce a potent inflammatory and immune response. This ensures their own destruction together with the surrounding untransfected micrometastatic tumor cell population and neovasculature and stroma. Methods of preparation, administration and assessment of these transfectants in tumor bearing hosts are in Example 1-3, 18-23.

[0191] The tumor cells are also transfected with the above microbial genes on a DNA template with a tissue specific promoter in order to target the activity of these transfected tumor cells to the vital organs (and sites therein) affected by the existing metastatic tumor. For breast cancer, this would be lung, liver or brain. These organ-specific promoters ensure that the expression of the microbial products would occur in the organ(s) targeted by the tissue specific promoter.

[0192] The same tumor cells are also provided with inducible promoter sequences which control the level of receptor transcription and expression. Inducible promoters suitable for use in mammalian cells include the MMTV-LTR under the control of steroid hormones and the metallothionein promoter under the control of heavy metal ions. In this case, the microbial nucleic acids are linked to steroid inducible gene sequences. Transcription is triggered when these cells are exposed to a threshold level of steroids. Hence, two to three days after administration to the host, when the above transfectants have colonized tumor metastatic sites, a bolus of corticosteroid is administered which initiates transcription of the microbial enzymes and toxins by the tumor cell transfectants and their secretion. In this fashion, the transfected tumor cells express and secrete their inflammatory products in metastatic tumor sites resulting in the elimination of metastatic disease.

[0193] 19. Tumor Cells as Mimics of Virulent Bacteria: Transfection With Nucleic Acid Encoding Bacterial Invasins, Virulence Factors, and Enzymes That Degrade Extracellular Matrix

[0194] Tumor cells with a metastatic phenotype are transfected with nucleic acids encoding proteins with the capacity to invade and adhere to inflammatory cells such as macrophages (adhesins and virulence factors). These genes are inducible and controlled by operons.

[0195] SAg-encoding nucleic acid is fused in frame to nucleic acid encoding oncogenes involved in tumorigenesis and metastasis. Examples of such genes, in addition to erb/neu, erb, erbB2 and EGF (epidermal growth factor receptor) discussed above, include ras and mutated ras, erk, and mta1, 182mtsl, nm23 (See Table 9.5, p181 of Franks L. M. et al., Cellular and Molecular Biology of Cancer, Oxford University Press, Oxford UK, ( 1997) which is incorporated by reference), as well as the laminin-integrin and the cadherin family. These genes are particularly useful because they are overexpressed in tumor cells displaying a metastatic phenotype.

[0196] Invasins

[0197] SAg-encoding nucleic acid is fused in frame or cotransfected into tumor cells with nucleic acids encoding bacterial invasins and hyaluronidases. The invasin imparts leukocyte like activity to bacteria is transfected into tumor cells which allows the tumor cells to penetrate tissues. These are exemplified by Yersinia pseudotuberculosis invasin and hyaluronidase (including its various isotypes) and also known as tissue spreading factors. The invasin gene exemplified in Y. pseudotuberculosis encodes a protein located in the outer membrane of the bacterium called invasin (Inv) and the gene is known as inv (SEQ ID NOS:32-33). The DNA region of the inv gene contains a open reading frame 2964 bases. This protein binds to the host cell surface by means of the C-terminal 192 residue region. Mutation by insertion of a transposon or elimination of the inv gene greatly impairs the ability of the bacterium to penetrate tissues (Schaecter M et al., Genetics of Bacteria edited by Baer G M et al., in Mechanisms of Microbial Disease Williams and Wilkins Baltimore (1993)).

[0198] The host membrane receptors for invasin belong to the integrin superfamily with a particular affinity for VLA-3, 4, 5, 6. Invasin also bind to T cell a4b1 which is involved in lymphocyte homing or traffic. Once bound to a phagocyte, phagocytosis is triggered and the bacterium is taken up. Nucleic acids encoding Inv are transfected into tumor cells which confers upon the tumor cell a phagocytosis triggering signal for host macrophages.

[0199] E. coli genes of the P pili or pap operon encoding adhesin proteins have been isolated from chromosomes and plasmids. The gene cluster is linked to genes for other virulence determinants such as the KI capsular polysaccharide and hemolysin. The receptor for the pili is the αGal(1-4)Gal moiety of the P blood group antigen. Examples of host cell receptors for bacterial adhesins is given in Table 7.2 of Patrick and Larkin. Pilin genes in N. meningitidis encode proteins is which the fimbriae are the N-methylphenylalanine pili. An extensive region of amino acid homology at the N-terminal end is common to a wide range of bacterial genera including Pseudomonas aeruginosa, N. gonorrhoeae, N. menigitidis, Moraxella bovis and Bacteroides nodosus. This N-terminal region is highly hydrophobic which is in contrast to the fimbriae of the Enterobacteriaceae which either have a hydrophobic region at the C-terminal end or lack a hydrophobic region altogether. Of interest is the presence of a site on SAgs which resembles the third Ig-like disulfide-bridged loop of VCAM-1 and a conserved sequence is present within the same subregion of the fifth Ig-like VCAM-1 loop. The only known receptor for the VCAM-1 is VLA-4, an adhesion molecule expressed primarily by activated T and B cells. A survey of target cell susceptibility to SEC dependent lysis shows a correlation between VLA-4 expression and susceptibility to lysis.

[0200] Hyaluronidases and Proteases

[0201] Bacteroides species produce hyaluronidase, heparanase, and chondroitin sulfatase enzymes. C. perfringens m toxin is a hyaluronidase enzyme and Bacteroides and C. perfringens produce elastase and collagenase enzyme while Porphyromonas gingivalis has a cell associated collagenase. Streptococcus pyogenes produces hyaluronidase enzymes which depolymerize their own capsules. Neuraminidases and endoglycosidases, lipases, nucleases and proteases produced by a wide variety of bacteria are also useful in this invention as capable of promoting tissue necrosis in tumor masses and/or tumor nests.

[0202] The staphylococcal invasive genome is predominantly chromosomal and the nucleic acid segments encoding the major invasive enzyme systems, permeability factors, and toxins have been isolated, cloned, and sequenced. For example, the nucleic acid sequence encoding a hyaluronidase from group A Streptococcus strain 10403 is described elsewhere (Hynes et al., Infect. Immun. 63:3015-3020 (1995)). Tumor cells transfected with nucleic acids encoding microbial invasive and inflammatory substances are preferentially used in vivo where they are programmed to traffic to metastatic sites and/or organs primarily infiltrated by the tumor. Once situated in tumor, they commence secretion of their inflammatory enzymes and toxins. Protocols for their preparation, use, and assessment are given in Examples 1-3, 18-23.

[0203] Consolidation of Bacterial Genes

[0204] The microbial nucleic acids encoding hyaluronidase, erythrogenic toxins proteases, coagulases and enterotoxins are consolidated into a chimeric construct or plasmid and transfected into tumor cells which then commence secretion of the spreading factors, pro-inflammatory and permeability inducing agents. For example, a single construct or multiple constructs contains the nucleic acid encoding polypeptides including, without limitation, enterotoxin B, hyaluronidase, streptokinase, coagulase, Staphylococcal protease and erythrogenic toxins.

[0205] Tumor cells transfected with the above microbial genes are prepared as in Example 1-3 and are used in the treatment of established and metastatic tumor or as a preventative vaccine as described in Examples 15-23.

[0206] 20. Combined Expression of Different Stimulatory Molecules by Co-transfection of Tumor Cells or Fusion of Singly Transfected Cells

[0207] Tumor cells that express two different types of exogenous molecules are produced by either cotransfection of the same cells with (a) SAg-encoding nucleic acid and (b) nucleic acid encoding a toxins or autolysin, or by fusion of tumor cells that have been singly transfected with (a) with tumor cells transfected by (b)

[0208] Tumor cells are provided which have the dual capacity to colonize metastatic tumor sites in vivo and induce inflammation. Once situated in sites of tumor metastasis, the tumor cells behave like a necrotizing bacterium or leukocyte. For example, tumor cell are transfected with nucleic acids encoding bacterial invasins to promote adhesion, “tissue spreading factor” or hyaluronidase to hydrolyze the ground substance, coagulase to induce local thrombosis and streptokinase and streptodornase. In addition, tumor cell are provided with nucleic acids encoding bacterial toxins which bind and produce autolysis and cytotoxicity for surrounding tissue and tumor cells. The tumor cells are also cotransfected with additional nucleic acids encoding SAgs. The toxin genes useful herein are amplified by providing two copies tandemly duplicated on a chromosome and linked to an amplified oncogene. Situated in tumor tissue, these transfected tumor cells release enterotoxins as well as inflammatory enzymes, immunogenic capsular lipoproteins, cell wall LPS's and cytolysins. This evokes a potent T cell and inflammatory response in tumor tissue. These inflammatory genes are inducible at the level of the operon or in some instances bacteriophage which controls their activation. Transfected tumor cells are transfected with microbial nucleic acids given above either in vitro or in vivo at tumor sites as in Example 1-3, 5, 16-23 and p. 11 under “transfection”.

[0209] The S. aureus a toxin forms pores or transmembrane channels in a wide range of host cells. It is released from the bacteria during exponential growth and has a molecular mass of 33 kDa. Expression of the gene encoding the a toxin, hly, is under the control of the agr gene which coordinately controls the expression of a number of extracellular proteins, including exfoliatin toxin, toxic shock syndrome toxin, a, b, and d toxins, enterotoxin B, lipases and nucleases. The b toxin is a phospholipase which attacks a sphingomyelin in the cell membranes. The phage encoding the toxin is hlb. Exfoliatin toxin A is encoded by a chromosomally located gene eta and the gene for toxin B is etb. The eta gene is by the agr gene regulator which is a member of the histidine-protein kinase response regulator superfamily. (Patrick S et al., Immunological and Molecular Aspects of Bacterial Virulence, John Wiley and Sons New York, N.Y. 1995)

[0210] SEB binds to glycosphingolipids on cell membranes. The ganglioside binding site on SEB is overexpressed, or a myristoylation site or GPI binding site is integrated into its structure so that it is bound to the surface of the tumor cell membrane and not secreted. The SEB will preferentially bind to tumor cell expressing ganglioside tumor associated antigens and will augment the immunogenicity of these antigens.

[0211] S. aureus produces a bifunctional protein autolysin of 110-kDa,(HlyA) via the atl gene that has an N-acetylmuramoyl-L-alanine amidase domain and an endo-b-N-acetylglucosaminidase domain. It undergoes proteolytic processing to generate two extracellular enzymes that are secreted. The specific secretion proteins HlyB and HlyD are 80 kDa and 54kDa respectively. The process is directed by the hlyB and hlyD genes which are contiguous and co-expressed with the hylC and hylA genes that are required for the synthesis of protoxin and the acyl carrier protein-dependent fatty acylation that matures it to cytolytically active toxin. Hemolysin is secreted as the mature acylated form of the hlyA gene product proHlyA following the covalent attachment of a fatty acid moiety in a cytoplasmic mechanism directed by the dimeric HlyC activator, a putative acyl transferase and dependent upon the acyl carrier protein. This specific and novel HlyC-directed fatty acylation is required to target the hemolysin toxin to mammalian cell membranes prior to forming cation-selective pores and disrupting the host cell.

[0212] Bacteria such as E. coli, Bordetella pertussis, Pasteurella haemolytica, Proteus vulgaris and P. mirabilis produce genetically related toxins. Their activity is dependent on the presence of calcium ions. Characteristically, they have regions of 10 to 47 repeats within the amino acid sequence and termed repeats in toxin or RTX gene family. The repeat sequence contains the following nine amino acids; (SEQ ID NO:34) leucine-X-glycine-glycine-X-glycine-asparagine-aspartic acid-X where X is a variable amino acid. These repeats are required for hemolytic activity. A large hydrophobic region of the hemolysin separate from the repeats, is also essential for activity and may be involved in the interaction with the host cell membrane. The hemolysin A of E. coli apparently form pores on the target cell membrane. This requires a 20 kDa product of another gene HlyC before it becomes actively hemolytic. In E. coli, the operon for the production of the hemolysin contains four genes hlyA which codes for the structural hemolysin and hlyC which is required for activation of the HlyA. The other two genes hlyB and hlyD are involved in the transport of HlyA to the extracellular environment. Pasteurella haemolytica leukotoxin and Bordetella pertussis adenylate cyclase hemolysin have similar C-terminal sequence and associated genes analogous to those in the hly operon. (Koronakis V et al., Secretion of Hemolysin and other Proteins out of the Gram-Negative Bacterial Cell, in Ghuysen J M et al., ed, Bacterial Cell Wall, Elsevier, Amsterdam (1994)).

[0213] The Shiga toxin of Shigella dysenteriae and Shiga-like toxins of E. coli (verotoxins) are a family of related toxins which have similar amino acid sequences and biological activities. The A subunit of Shiga toxin has a molecular mass of 31 kDa which associates with five to the 7 kDa B subunits. The A subunits is proteolytically cleaved into A1 and A2. It is the A1 fragment which is biologically active. The host cell receptor for Shiga toxin is the glycolipid Gal(α1-4)Gal(β1-4) GlcCeramide (globotriosylceramide; Gb3) and for Shiga-like toxin I (SLTI) and SLTII of E. coli is Gal(α1-3)GalCeramide (Galabiosylceramide). The binding specificity is dependent on both sugars residues and the lipid moiety. The Shiga toxin is known to inhibit protein synthesis. It is a RNA N-glycosidase enzyme whose site of action is the 60S ribosomal subunit. The toxins remove an adenine base from position 4324 on the aminoacyl -transfer RNA binding site of 28S ribosomal RNA hence preventing peptide length elongation. The effect on protein synthesis is similar to that of diphtheria toxin and Pseudomonas aeruginosa exotoxin A. The SLTI and II toxins of E. coli and encoded by lysogenic phage. Its expression is controlled by iron concentration in the growth medium by way of the fur gene and iron box repressor protein binding site. Clostridia difficile toxins A and B also bind to anomeric galactose epitopes on cell membranes and induce membrane associated enzymes and inhibit G protein activation which results in cell death. Tumor cells transfected with a galactosyltransferase genes to produce the a α-Gal epitope are susceptible to lysis by both the Shiga-like toxins and C. difficile toxin. The expression of the α-Gal epitope is enabled by the transfection of nucleic acids encoding -Gal transferase into tumor cells.

[0214] Listeria monocytogenes produces a hemolysin. listerolysin O (LLO), a member of the thiol-activated family of cytolysins. LLO is encoded by the gene hyl (also designated hylA and lisA). Listerolysin O toxin is a pore forming toxin which degrades the membrane of its phagocytic vacuole allowing the bacterium to escape into the host cytoplasm. This gene cloned into Bacillus subtilis enables the bacterium to grow rapidly intracellularly in the cytoplasm of a macrophage-like cell line after disrupting the phagosomal cell membrane.

[0215] Tumor cells are transfected with the above microbial nucleic acids as in Example 1-3. These transfectants are useful in vivo against established tumor and micrometastatic disease (Examples 5, 15, 16, 18-23).

[0216] 21. Augmentation of Tumor Cell Immunogenicity by Bacterial Products: Transfection with Genes Encoding Bacterial Antigens or Receptors for Bacterial Products

[0217] Tumor cell are provided with augmented antigenicity by expressing fundamental patterns that are recognized by fundamental recognition units of the innate immune response.

[0218] Examples are LPS's of gram negative organisms, SAgs and peptidoglycans of gram positive organisms, fungal β-glucans, bacterial glycosylceramides, and mycobacterial lipoarabinans. Numerous infectious agents with these structures cause potent immune reactions e.g. streptococcal cellulitis induced by S. pyogenes, E. coli induced sepsis and meningococcal meningitis induced by Neisseria meningitidis (SEQ ID NOS:35-36).

[0219] The T cell system is far more adept at responding to innate pattern recognition units than to tumor associated antigens. In the present invention, tumor cells are transfected with nucleic acids encoding molecules or biosynthetic enzymes that result in structures which mimic the major immunogenic structures of bacterial antigens. This enables the tumor cells to be recognized more effectively by the T cell system. In addition, tumor cells are provided with receptors for bacterial antigens such as SAgs, LPS's (CD14), and glycosylceramides (CD1). Genes encoding bacterial antigens which produce potent immune responses are transfected into tumor cells to include bacterial membrane and cell wall constituents such as LPS's, peptidoglycans, glycosylceramides, lipoproteins, lipoarabinans and capsular polysaccharides. In addition, nucleic acids encoding the staphylococcal SAgs induce potent T cell lymphoproliferation and TH-1 cytokine production while LPS's are known to have a bystander effect on T cell proliferation The two agents synergize in their capacity to induce lethal endotoxic shock in animals.

[0220] The present invention contemplates that the optimal approach is to present the bacterial immunogen structure (for example streptococcal capsular polysaccharide) sequentially or concomitantly with a bacterial mitogenic signal (SAg). Under certain conditions, these genes are co-transfected with various bacterial invasins, toxins, autolysins and inflammatory enzymes which together with the colonizing properties of tumor metastasis genes produce a tumor cell capable of migrating to metastatic sites where it induces necrotizing cellulitis. Such genes are preferably placed under the control of inducible promoters as described herein. These transfectants are prepared by methods in Example 1-3. They are useful against established tumors or metastatic tumor in vivo as in Example 15, 16, 18-23.

[0221] 21b. Combining Expression of SAg Nucleic Acids with Nucleic Acids Encoding Enzymes that Drive the Synthesis of Bacterial LPS Galactosylceramide or Capsular Polysaccharide

[0222] In general, this is accomplished by co-transfection of nucleic acids each encoding one of the above products or by transfection with a fusion nucleic acid that encodes the combination. SAg-encoding nucleic acid is fused in frame or cotransfected into tumor cells or accessory cells with nucleic acids encoding bacterial LPS's, peptidoglycans, and galactosylceramides. The preferred end products are synthesized in E. coli and N. meningitides (LPS's), Staphylococcus and Streptococcus (peptidoglycans); Sphingomonuas paucimobilis (glycosylceramides).

[0223] The synthetic genome or cluster of genes for biosynthesis of these products is incorporated as a whole to include multiple and specific enzymatic transferases and trafficking proteins required for the stepwise synthesis of each of these products. Gene clusters are necessary to provide the requisite transferases for synthesis of these large molecules. For example the genes required for the biosynthesis of type 1 capsular polysaccharide of S. aureus are localized to a 14.6-kb region. Sequencing analysis of the 14.6-kb fragment revealed 13 open reading frames (ORFs). Ten genes are involved in capsule biosynthesis. CapG aligned well with consensus sequence of a family of acetyltransferases from various prokaryotic organisms suggesting that CapG may be an acetyltransferase.

[0224] The structural requirements for endotoxic activity of LPS's are as follows. (1) αβ (1-6)-linked D-glucosamine disaccharide backbone; (2) biphosphorylation at positions 1 and 4′ of the disaccharide backbone; (3) a suitable number of 3-acyloxyacyl groups per disaccharide unit; and (4) acyl groups of a suitable length as indicated by Kumazawa et al., and Nakatsuka et al. Transfection with nucleic acid encoding LPS's would require the preservation of the biphosphorylation and the acyl groups between 14 and 23 to maintain optimal activity. Derivatives may contain a monosaccharide group in place of the disaccharide group.

[0225] LPS Structure

[0226] LPS consists of an outer region which is composed of polymerized di- and pentasaccharide repeating units whose compositions vary within a species or strain. The inner region is generally conserved within a single genus, and consists of a core oligosaccharide linked by the sugar 2-keto-3-deoxy-D-amino-octonate (KDO to a disaccharide backbone with attached long chain fatty acids, the lipid A. This component is responsible for much of the biological activity of the molecule. Components conferring the greatest biological and immunomodulatory activity are now known to be a glucosamine disaccharide, a bis phosphorylated lipid A and acyloxyacyl groups on the fatty acid chain. The loss of only one of these components, for example, a phosphate group reduces the activity of the molecule. LPS's from different genera of bacteria vary in their immunomodulating activity and studies of the structure have shown very subtle differences. For example, Bacteroides is apparently less active in endotoxin activity than LPS from enteric bacteria. This was initially thought to be related to a modification of the of KDO in the core region with an added phosphate group. Other differences in the LPS were found when the fatty acids from E. coli and Bacteroides were compared. E. coli has six fatty acid chains or acyl groups per diglucosamine backbone each with a chain length of 12-14 carbon atoms. Included in the acyl groups is 3-hydroxytetradecanoic acid (3-OH-C14:0)which is absent in the Bacteroides strains. In contrast, Bacteroides has 4-5 fatty acids of chain length 15-17 carbons per diglucosamine and has branched 3-hydroxy fatty acids. Studies of synthetic lipids have confirmed that reduced biological activity relates to fewer fatty acids chains.

[0227] A common feature of LPS's from various species is that they are amphiphiles, with both a hydrophobic part capable of dissolving in lipid membranes and a hydrophilic part which remains in the water phase. Therefore, the first step of molecular interaction is one between the amphiphilic molecule and the mammalian cell surface either by ionic binding, hydrogen bonding or hydrophobic interaction. The bacterial molecule may be inserted into the mammalian membrane by its hydrophobic moiety or attached to membrane receptors with the hydrophilic moiety, or through charge effects or via binding to host glycoproteins and glycolipids resulting in signal transduction. Most of the immunomodulating activity of these bacterial molecules is indirect and stems from the release of host mediators. Cytokines such as IL-1, tumor necrosis factor, and IL-6 are involved. The LPS binding protein attaches to gram-negative bacteria or free LPS and mediates the attachment to macrophage membrane receptor known as CD14. The recognition of the CD14 only recognizes LPB when it is bound to LPS. The LPS-LPB complex may directly trigger TNF release or hold the complex at the cell surface so that other hosts cell surface molecules trigger TNF release. LPBs also act as opsonins. Another area where sugar residues play an important role is in cell surface glycoprotein interactions which involve protein-carbohydrate recognition. In the recirculation of and recruitment of leukocytes in the body, the carbohydrate-recognizing protein domains of glycoproteins of one cells bind specifically to the oligosaccharides of glycoconjugates on another type of cell. These recognition events control the movement of bloodbome lymphocytes into lymphoid organs. Specific recognition occurs between lymphocytes and specialized cells in the wall of blood vessels known as high endothelial venules.

[0228] Genes Encoding Lipid a Biosynthesis

[0229] LPS is generally synthesized as two separate components, the lipid A/core and the O polysaccharide, which are then ligated to give the complete LPS molecule. Three genes encode enzymes that catalyze the steps of lipid A synthesis (lpxA, lpxD and lpx B for steps 1, 3 and 5) and fabZ and envA. More specifically, the enzymes that catalyze the synthesis of lipid A are thought to act in the following sequence (indicating the genes): lpx A, lpx C, lpx D, lpxB. The reactions catalyzed by the products of these genes are given in Table 1 of Schnaitman C A et al., Microbiol. Rev. 57: 655-682 (1993).

[0230] Blocks of Genes Involved in LPS Biosynthesis

[0231] Blocks of genes involving LPS synthesis have been sequenced and analyzed. The lipid A biosynthetic pathway has been elucidated. Four of the genes in this pathway have now been identified. Three of them are located in a complete operon which also contains genes involved in DNA and phospholipid synthesis. Genes involved in synthesis of the LPS lipid A core are given in Tables 1 and 2 and their activity at various points in the biosynthetic pathway are given in FIG. 1 of Schnaitman C A et al., Microbiological Reviews 57: 655-682 (1993). which is incorporated by reference. Therefore, it is likely that LPS biosynthetic enzymes are organized into clusters on the inner surface of the cytoplasmic membrane around a few key membrane proteins.

[0232] A cluster of assembly genes produced by various bacteria encode LPS with homologous structures. These genes have been transfected into E. coli and they induce identifiable LPS's. There are also smooth and rough LPS's which have a hierarchy of potency in terms of procoagulant activity and activation of TNF. Mutants produced which synthesized progressively less polysaccharide attached to the lipid A moiety. The presence of long chain polysaccharides attached to the lipid moiety decreased the ability to activate TNF. Rough bacteria were more effective than smooth bacteria in inducing TNF production. Fatty acids of various chain lengths can be produced including those that resemble monogalactosylceramides. Transferases for biosynthesis of galactan the LPS structure of the O antigen from Klebsiella pneumoniae have been identified as well as genes controlling the O antigen chain length.

[0233] The genes for LPS and glycosylceramide assembly also involve multiple transferases. The transfection of tumor cells involves 10 genes encoding a particular stretch of the bacterial genome. In E. coli, the 14-kilobase pair chromosomal region located between waaC (formerly rfaC) and waaA (kdtA) contains genes encoding enzymes required for the synthesis and of the type R2 core oligosaccharide in the lumen of the endoplasmic reticulum. This occurs in a stepwise fashion. The gene encoding the Haemophilus influenzae type B outer membrane protein functions as a porin and is useful in protective immunity has been cloned as a 10-kilobase Hib DNA insert and expressed in E. coli. The biosynthesis of LPS's involves genes encoding the key transferases including rfaI. The N. meningitides highly conserved surface protein conferring protection is encoded by a ORF of 525 nucleotides.

[0234] Genes Encoding Enzymes the Catalyze Core Biosynthesis

[0235] The rfa cluster includes the genes for all transferases for assembly of core. It includes three operons consists of at least 17 genes. The majority of known genes whose functions are involved exclusively in LPS core biosynthesis are located in the rfa cluster (Pradel E et al., J. Bacteriology 174: 4736-4745 (1992)). It includes three operons. However, there are also genes such as kdsA and rfae located outside the rfa cluster which are involved in biosynthesis of sugars unique to the core or exert direct effect on core structure. These clusters appear to have originated by the exchange of blocks of genes among ancestral organisms. There are few which code for the integral membrane proteins. The promoter for the rfa genes has been identified. Mutations have been identified known a rough mutants traced to three loci namely rfa, rfb and rfc.

[0236] The region of the E. coli chromosome encoding enzymes responsible for the synthesis of the LPS core has been cloned. This region formerly known as the rfa locus comprises 18 kb of DNA between the markers tdh and rpmBG. The genes are arranged in three different operons and the genetic organization of this locus seems to be identical in E. coli K-12 and S. typhimurium.

[0237] Linkage of LPS Transcription and Toxin Secretion

[0238] In E. coli and Salmonella, a link has been found between toxin secretion and the gene regulating LPS transcription. Toxin secretion is regulated by gene expression within the hlyCABD operon. A recently identified activator of hlyCABD gene expression is the 128-kDa product of the rfaH (sfrB) gene which positively regulates transcript initiation and possibly termination in the operons encoding synthesis of LPS of E. coli and Salmonella. The discovery of a role in hlyCABD expression for the LPS (rfa) operon transcriptional activator rfah is consistent with the role of LPS in influencing both the secretion and toxic activity of the toxin.

[0239] Genes Encoding Enzymes that Synthesize Polysaccharide Capsule and Membrane Proteins

[0240] Genes for the biosynthesis of a polysaccharide capsule are induced in Sphingomonas by overlapping DNA segments which span about 50 kbp restored the synthesis of sphingan. The polysaccharide components of LPS from B. Pertussis, H. influenzae and Bacteroides spp. will activate B-cells. The polysaccharide of Bacteroides activates B cells indirectly by first triggering the macrophage whereas the lipid A moiety triggers the B cells directly. Therefore different parts of the same molecule interact with different types of host cells. There is also evidence that immunopotentiating activity of a glycopeptide produced by mycobacteria is dependent on the saccharide residues of the molecule.

[0241] The capsular polysaccharide of the Streptococcus is extremely immunogenic, consisting of glycan strands composed of regularly alternating N-acetylglucosamine and N-acetylmuramic acid residues joined through b-1,4 glycosidic linkages and attached to crosslinked peptides by amide bonds. The capsule of strain M is composed of taurine-2-acetamido-2-deoxyfucose and 2acetamido-2-deoxy-D-galacturonic acid. The gene for this structure called cap-1 has been cloned and is used to transfect tumor cells. The nucleic acid sequences appear in Lin et al., J. Bacteriol. 176, 7005-7016 (1994).

[0242] A new 24-kDa group A streptococcal membrane protein known as streptococcal protective antigen (Spa) has been identified and is distinct from the surface M protein which evokes protective opsonizing antibodies. The Spa-encoding gene has been cloned and consists of a 636-bp 5′ fragment. (Dale, J B et al., J. Clin. Invest. 103: 1261-67 (1999)).

[0243] The present invention contemplates the use for cancer treatment of these and other bacterial antigens from staphylococci, streptococci, E. coli, N. mengitides, and other genera which antigens evoke an immune response in mammals. In the preferred approach, a nucleic acid encoding such an antigenic structure is transfected and expressed in tumor cells. Methods of preparation, use and assessment of these therapeutic constructs in tumor bearing hosts are in Example 1, 2, 18-23.

[0244] SAg nucleic acids are fused in frame or cotransfected into tumor cells or accessory cells with nucleic acids encoding key transferases (gene clusters) and glycosylation sites encoding capsular membrane from Streptococcus or Neisseria menigitidis lipoprotein-LPS-phospholipid and cell wall peptidoglycans, i.e., N-acetylglucosamine (NAG) and N-acetylmuramic acid (NAM).

[0245] SAg DNA is fused in frame to DNA encoding a highly conserved outer membrane surface protein of N. meningitides known as Nspa. The Nspa gene has been cloned (Martin, D. et al., J. Exp. Med. 185: 1173-1183 (1997)). The LPS produced would be of weak to intermediate strength such as that produced by Listeria or Legionella.

[0246] Borrelia burgdorfi is the causative agent of Lyme disease. The osp genes are located at a single genetic locus on a 49 kb double-stranded DNA linear plasmid where they are organized as an operon ospAB. The amino acid sequences of OspA and OspB show a high degree of similarity and resemble prokaryotic lipoproteins. Nucleic acids encoding the ospA and ospB lipoproteins are cotransfected into tumor cells together with SAgs.

[0247] Genes Encoding Membrane Glycosylceramide Biosynthesis

[0248] Nucleic acids encoding the synthesis of the GalCer from Sphingomonas paucimobilis are transfected into tumor cells, resulting in the synthesis of GalCer by the tumor cell. (Kawahara K et al., FEBS Letters 292: 107-110, (1991) Yamazaki M et al., J. Bacteriology 178: 2676-2687 (1996) Natori T et al., Tetrahedron Letters 34: 5591-5592 (1993) Costantino V et al., Liebigs Ann. Chem. 96: 1471-1475 (1995)). Nucleic acids encoding enzymes responsible for synthesis of Neiserria meningitides LPS are transfected into tumor cells, resulting in the synthesis of LPS by the tumor cell (Steeghs L et al., Gene 190: 263-270 (1997)). These nucleic acids encoding key transferases are fused to nucleic acids encoding amplified oncogenes or transcription factors such as Bcl-2, c-myc, K ras, bcr, c-abl or NF-kB.

[0249] Genes Involved in Mycobacterial Cell Wall Biosynthesis

[0250] SAg-encoding nucleic acid is fused in frame or cotransfected into tumor cell with nucleic acids encoding the key enzymes involved in the biosynthesis of mycobacterial cell wall mycolic acid, phosphatidylinositol mannosides and lipoarabinans. A high affinity interaction of CD1b molecules with the acyl side chains of known T cell antigens such as lipoarabinomannan, phosphatidylinositol mannoside and monomycolate has been demonstrated. Hence the nucleic acid encoding the CD1 receptor are cotransfected into tumor cells together with SAg-encoding nucleic acid and nucleic acids encoding the multifunctional fatty acid and mycocerosic acid synthases involved in the biosynthesis of mycolic acid and methyl-branched fatty acids.

[0251] The multifunctional genes for mycocerosic acid synthase involved in the biosynthesis of these molecules have been isolated. In addition to the usual fatty acids found in membrane lipids, mycobacteria have a wide variety of very long-chain saturated (C18-C32) and monounsaturated (up to C26) n-fatty acids. The occurrence of a-alkyl b-hydroxy very long chain fatty acids i.e., mycolic acid is a hallmark of mycobacteria and related species. Mycobacterial mycolic acids are the largest (C70-C90) with the largest -branch (C20-C25). The main chain contains one or two double bonds, cyclopropane rings, epoxy groups, methoxy groups, keto groups or methyl branches. Such acid are the major components of the cell wall, occurring mostly esterified in clusters of four on the terminal hexa-arabinofuranosyl units of the major cell wall polysaccharides called arabinogalactans. They are also found esterified to the 6 and 6′ positions of trehalose to form “cord factor”. Small amounts of mycolate are also found esterified to glycerol or sugars such as trehalose, glucose and fructose depending on the sugars present in the culture medium. Mycobacterium also contains several methyl-branched fatty acids. These include 10-methyl C18 fatty acid (tuberculostearic acid found esterified in phosphatidyl inositide mannosides), 2,4-dimethyl C14 acid and mono-, di- and trimethyl-branched C14 to C25 fatty acids found in trehalose-containing lipo-oligosaccharides, trimethyl unsaturated C27 acid (phthienoic acid), tetra-methyl-branched C28-C32 fatty acids (mycocerosic acids) and shorter homologues found in phenolic glycolipids and phthiocerol esters and multiple-methyl-branched phthilceranic acids such as heptamethyl-branched C37 acid and oxygenated multiple methyl-branched acids such as 17-hydroxy-2,4,6,8,10,12,14,16,-octamethyl C40 acid found in sulfolipids.

[0252] Genes Involved in Mycolic Acid Biosynthesis

[0253] The biosynthesis of mycolic acids involves fatty acid chain elongation, desaturation, cyclopropanation of the olefin and a Claissen-type condensation. The genes involved in cyclopropanation are cma1, cma2. The methoxymycolate series found in M. tuberculosis contains a methoxy group adjacent to the methyl branch, in addition to the cyclopropane in the proximal position. A series of four methyl transferase genes was cloned. The mm4 methylates the distal olefin.

[0254] The multifunctional fatty acid synthase (FAS) (type 1) catalyses not only the synthesis of C16 and C18 fatty acids but also elongation to produces C24 and C25 fatty acids. Cloning and sequencing of the synthase gene revealed a 8389 bp ORF. The domain organization is much like a head to tail fusion of the two yeast FAS subunits; acyl transferase (AT)-enoyl reductase (ER)-dehydratase (DH)-malonyl/palmitoyl transferase-acyl carrier protein (ACP) fused with b-ketoreductase (KR)-b-ketoacyl synthase (KS).

[0255] The MAS gene encoding mycobacterial mycocerosic acid synthase is a dimer of the FAS gene. The cloning and sequencing of the MAS gene revealed the domain organization in the following order: KS-AT-DH-ER-KR-ACP. The purified MAS shows a preference for elongation by four methylmalonyl CoA units reflecting the natural composition of mycocerosic acids. FAS and MAS are also involved in the biosynthesis of phthiocerol and phenolphthiocerol which involve elongation of preformed n-C20 fatty acyl chains or an acyl chain containing a phenol residue at the w-end. The cluster of five genes, ppsil-5 encode the multifunctional enzymes (Fernandes N D et al., Gene 170: 95-99 (1996) Mathur M et al., J. Biol. Chem. 267:19388-19395 (1992) Yuan Y. et al., Proc. Natl. Acad. Sci. USA 92: 6630-6634 (1995)).

[0256] Tumor cells are cotransfected with SAg-encoding DNA and nucleic acids encoding the biosynthesis the above microbial products. The transfected tumor cells acquire significant additional immunogenicity. These cells are prepared as in Example 1-3. They are useful in vivo as a preventative or therapeutic antitumor vaccine (Examples 5 15, 16 18-23. They are also useful ex vivo to immunize T or NKT cells to produce a population of effector T or NKT cells for adoptive immunotherapy of cancer (Examples 2-5, 15, 16, 18-23).

[0257] 22. SAg-Ganglioside or SAg-Galactosylceramide Complexes Formed after Transfection of Tumor Cells with DNA Encoding SAgs: Complete Bacterial Antigen System Recognized by CD1 Receptors Capable of Inducing Anti-Tumor Effects

[0258] SAg-encoding nucleic acid transfected into tumor cells express SAg on the tumor cell surface which is bound to cell surface gangliosides which are tumor associated antigens, oncogene product such as EGF or IGF. In this way the tumor associated antigen is capable of recognition and interaction with host T cells and macrophages and of evoking a potent immune response. The SAg is also bound or associated with the CD1 receptor alone or associated with the glycosphingolipid tumor associated antigen.

[0259] SAgs have a natural affinity for glycosphingolipids on cell membranes. Enterotoxin-producing-bacteria secrete enterotoxins which in their precursor state are bound to cell membranes in dimeric form. Enterotoxin transfected tumor cells induce an anti-tumor response by expressing the tumor cell surface antigen in association with the SAg. Bound to the tumor cell membrane, the SAg may be in dimeric form associated with the ceramide lipophilic anchor domain of a glycosphingolipid tumor associated antigen. Likewise, the SAg may be associated with the carbohydrate moiety or the ganglioside which protrudes from the cell surface. It may also be secreted in monomeric or dimeric form fused to membrane associated tumor antigen, oncogene product or receptor. If the tumor associated glycosylceramide, glycoprotein antigens, or glycolipid antigen with or without SAg are presented on CD1 receptors, then NKT cells may generate the predominant T cell response. However the classical T cell system is also responsive.

[0260] These constructs are produced and used as a vaccine against established tumor by protocols given in Examples 2-5, 15, 16, 18-23.

[0261] 23 . Nucleic Acids Encoding CD1 Receptors

[0262] Nucleic acid encoding the CD1 receptor is transfected into tumor cells, resulting in expression of the CD1 receptor on the tumor cell surface. Promoters of CD1 synthesis are also useful in this invention. The human genome includes five CD1 genes (A-D) which also function in antigen presentation to T cells (Calabi, F et al., CD1: From Structure to Function in Immunogenetics of the Major Histocompatibility Complex, Srivastava, R et al., eds, VCH publishers, New York, N.Y., 1991). In mice, two homologous proteins (mCD1.1 and 1.2) have been characterized and map to chromosome 3. The human CD1 genes are located on chromosome 1q221-q23 in the order D-A-C-E from the centromere on a 190 kb segment of DNA. With the exception of CD1B, they are all in the same transcriptional orientation. They are evenly spaced in the complex with one exception: CD1D and CD1A are spaced two to three times farther apart than the average. The products of CD1A, -B and -C genes have been defined serologically. The products of CD1D and CD1E are unknown. They share a highly conserved exon domain which is homologous to the b2m-binding domain (a3) of MHC class I antigens. The CD1 molecules are not polymorphic and apart from CD1D, are noncovalently associated with b2m in a TAP-independent manner. Complex alternative splicing of CD1 genes results in tissue specific forms of the protein, which can be intracellular, membrane bound, or secreted. In cells infected with mycobacteria, the CD1 molecule binds and presents a mycobacterial membrane component, mycolic acid. Surface CD1 molecules present longer peptides than those normally found on class I molecules. Whether CD1 molecules can also present peptide antigens is still unclear although this has been shown for at least one member of the CD1 family.

[0263] Tumor cells are transfected with nucleic acid encoding the CD1 receptor. Nucleic acid encoding cell wall or cell membrane associated glycosylceramides or a branched, b hydroxy long-chain fatty acids found in mycobacteria and other bacteria are cotransfected into the CD1 transfected tumor cells. The tumor cell therefore displays glycosylceramides bound to the CD1 receptor.

[0264] Using site directed mutagenesis, DNA encoding the CD1 receptor is provided along with DNA encoding a SAg binding site. This SAg binding site consists of key amino acids from the SAg receptor or from the SAg binding sites on (i) MHC class II chains or (ii) the TCR VP region. This may consist of a glycosphingolipid sequence (sensitive to endoglycoceramidase) present on some mammalian cells.

[0265] The glycosylceramide used to bind to the CD1 receptor will have an exposed SAg binding site which is sensitive to endoglycoceramidase, an enzyme from Rhodococcus which specifically cleaves the glycosyl moiety from glycosphingolipids. Other ceramidases break up sphingolipid into fatty acids and sphingosine.

[0266] These tumor cells transfectants are prepared as in Examples 1 and 2. They are used in vivo as a preventative or therapeutic antitumor vaccine as in Example 14-16, 18-23. They are also useful ex vivo to produce a population of tumor specific T or NKT cells for adoptive immunotherapy of cancer (Example 2-5, 7, 15, 16, 18-23).

[0267] 24. DNA Encoding Streptococcal M Proteins and DNA Encoding Protein A or its Fc and VH3 IgG binding Domains Transfected into Tumor Cells Alone or SAg DNA

[0268] The streptococcal M proteins are type-specific and act as protective or virulence factors. M protein genes are members of a larger emm-like gene family, such that many S. pyogenes strains express more than one M-like protein. DNA encoding the streptococcal M protein and DNA of the larger emm-like family are transfected into tumor cells (Kehoe M. A., “Cell-Wall Associated Proteins in Gram-Positive Bacteria,” In: Bacterial Cell Wall, Ghuysen J M et al., eds, Elsevier, Amsterdam, 1994).

[0269] In addition, DNA encoding protein A and its domains as well as DNA of the streptococcal fcrA76 gene located upstream of the emm-like gene are transfected into tumor cells individually or together to cause the expression of IgG FcR- and VH3 IgG-binding domains (Kehoe M A, supra). DNA encoding SAg is cotransfected into the same tumor cells to produce a tumor cell expressing any combination of M protein, protein A and a SAg.

[0270] Such cells are used in vivo as preventive vaccines or as therapeutic vaccines against established tumors. See Examples 1-5, 11, 15, 16, 18-23. They may also be used ex vivo to induce populations of active tumor specific effector T cells that are then used in adoptive immunotherapy. See Examples 2-5, 7, 15-16, 18-23, 25.

[0271] Nucleic Acids, Bacterial Cells and Phage Displays Mimicking SAgs

[0272] Because of circulating naturally occurring antibodies in humans, native or mutated SAgs that are administered parenterally are not likely to reach the appropriate receptors on T cells or tumor cells. To solve this problem, mimic oligonucleotides are prepared—these mimic SAgs in their capacity to bind SAg receptors. Since no natural antibodies are directed to these compositions, they will not be prevented from reaching specific SAg receptors in vivo.

[0273] SAg receptors are used to screen oligonucleotides for their ability to mimic SAg binding. Useful receptors for such screening include those described herein (as expressed on tumor cells) and T cell TCR V chains. For example, pools of oligonucleotides are tested for their binding to, and affinity for, immobilized SAg receptors using nucleotide chromatography technology well known in the art. Once these high affinity binding oligonucleotides are identified, they are isolated (or, following sequencing, may be synthesized) and administered to a host.

[0274] Also included here is a bifunctional oligonucleotide-peptide chimeric molecule that binds specifically to the SAg receptor on tumor cells as well as the Vb region of the TCR. Such an oligonucleotide will bind simultaneously to tumor cells and T cells (in the process of activation) to produce an anti-tumor response. An oligonucleotide-protein construct is prepared consisting of (a) a peptide sequence of enterotoxin A that binds to the TCR and (b) an oligonucleotide that binds to SAg receptor on tumor cells. The peptide portion of this construct should be devoid of MHC class II binding sites in order to minimize undesired binding of the molecule to class II structures upon administration in vivo.

[0275] In another embodiment, the nucleic acid portion of the chimeric molecule binds to the TCR while the peptide consists of a non-enterotoxin ligand that is specific for the SAg receptor on tumor cells. This construct has the advantage of lacking any binding site for natural antibodies. Yet another additional chimeric molecule consists of an oligonucleotide portion specific for the class II ( or ( chain and a second oligonucleotide or a peptide specific for the TCR Vβ chain.

[0276] Methods for preparing these constructs are given in Examples 5, 13. These constructs are especially useful for targeting tumors in vivo while also promoting a T cell anti-tumor response. See Examples 18-23. However, these chimeric molecules may also be used ex vivo in the production of tumor specific effector T cells capable of inducing, or effecting, an anti-tumor response when administered to a tumor bearing host. See protocols in Examples 2-5, 15, 16 18-23.

[0277] SAg and GlycosylCeramide Co-Expression

[0278] This may be accomplished using intact bacteria or phage display approaches. Since the precursors and substrates of the glycosyltransferases are not readily available in most mammalian cells, it is more convenient to induce dual expression of GalCer and SAgs in bacteria, for example Sphingomonas paucimobilis, which naturally produce GalCer. Hence, nucleic acid encoding a SAg is transfected into this bacterium together with a suitable promoter well known in the art. The bacterium produces both GalCer and SAg.

[0279] By ensuring that the SAg contains one or more glycosylation sites (by using the appropriate nucleic acid sequence), a glycosylated SAg is produced. Such a SAg binds to the glycosyl ceramide, e.g., GalCer to form a conjugate that is expressed on the bacterial surface of is secreted. In either form, such a SAg-GalCer conjugate can sensitize NKT cells to produce an anti-tumor response.

[0280] In addition, phage or plasmids encoding the appropriate transferase are transfected into low virulence Staphylococcus species which also produce enterotoxins. The bacterium acquires the capability of expressing GalCer on its surface. These bacterial constructs and compositions are used in vivo in a tumor bearing host to produce an anti-tumor response in protocols given in Examples 5, 13, 15, 16 18-23 and Detailed Description Section 19. They are also are used ex vivo to activate NKT cells or T cells to differentiate to tumor specific effector cells for use in adoptive immunotherapy of cancer by protocols in Example 1, 2, 14-16, 18-23).

[0281] Phage display technology is used to target selected SAg sequences to targets in vivo. The selected peptide is used as a binding sequences in lieu of the full-length polypeptide. This permits elimination from the construct of the antigenic portion of the SAg to which natural antibodies are directed. Cloned genes are expressed as part of phage coat proteins, for example, as fusions with the gene III protein (gIIIp) or the gene vIII protein (gVIIIp). In addition to the displayed gene product, the phage genome (of each particle) includes the gene encoding this product.

[0282] Phage display is preferably done using the filamentous phage f88-4 and comprises forming a fusion that results in the C terminus of the “selected” (i.e., inserted gene's) product and the N terminus of the phage protein gVIIp. Peptides of various enterotoxins are expressed in the phage display—most preferably peptides that bind to the SAg receptor on colon carcinoma cells. These peptides retain their capacity to bind to the TCR and to activate T cells. Also contemplated within this invention is phage display of SAg plus nucleic acid encoding synthesis of GalCer and/or the Gal epitope. DNA for synthesis of GalCer is preferably isolated from Sphingomonas paucimobilis; DNA encoding the galactosyl transferase for synthesis of Gal is preferably isolated from Klebsiella aerobacter, Serratia, E. coli and Salmonella organisms which naturally produce and express these epitopes. The phage displays are administered in vivo and are capable of initiating a potent immune response to the tumor using the protocols described in Examples 5 and 13 and Section 19, above. These preparations are also useful for activating T cells or NKT cells ex vivo to produce a tumor specific effector cells for use in adoptive immunotherapy (Examples 2-5, 14-16, 18-23).

[0283] Viral infection of a host cell having the galactosyl transferase results in the shedding of virions that express the αGal epitope. When a host mammalian cell has been transfected with nucleic acid encoding SAg, the virus can coexpress the Gal epitope and the SAg on its surface. Such a viral construct is administered in vivo to achieve a therapeutic effect, or, in another embodiment, is employed ex vivo to produce tumor specific effector T or NKT cells for use in adoptive immunotherapy of cancer (Examples 2, 3, 7, 15, 16, 18-23).

[0284] 26. Combining SAgs with Enterotoxin Precursors (Cell-bound Dimers and Oligomers) and with Enterotoxin Promoters and Transcriptional Regulatory Genes Cell-bound SAg Dimers and Oligomers

[0285] Staphylococcal enterotoxins are present in the membrane of enterotoxin producing bacteria in dimeric form and retain potent enterotoxin-like activity when isolated from the membrane. It is in this membrane-bound form that enterotoxins are combined with tumor associated antigens or oncogene products and presented to the T cell system. The dimerization of the enterotoxins may promote clustering for more effective presentation to T cells. Indeed, dimerization or polymerization of enterotoxins or the introduction of tandem repeats of the SAg binding sites for TCR and MHC class II may be achieved by (1) site directed mutagenesis of the enterotoxin plasmid and (2) introduction of sequences for gene amplification, tandem repetition and/or recombination or by (3) introduction of enzymes for peptide chain elongation. The duplication may be at the level of the bacterial operon including its transcriptional regulators, using methods well described in the art.

[0286] Modified plasmid is DNA is introduced into the target tumor cells or into accessory cells, either or both of which are useful in vivo as a preventative or therapeutic vaccine (Examples 1, 2, 15, 16, 18-23). Such genetically transformed cells may also be used ex vivo to produce effector T or NKT cells for adoptive immunotherapy (Examples 1, 2, 7, 15, 16, 18-23).

[0287] SAg agr locus (accessory gene regulator) and other bacterial genes and elements

[0288] At least 15 gene coding for potential virulence factors in S. aureus are regulated by a putative multicomponent signal transduction system encoded by the agr/hld locus. The synthesis of at least 14 exotoxins and enzymes in S. aureus is regulated by a set of transacting elements from agr. The agr gene coordinately controls the expression of exfoliatin toxin, toxic shock syndrome toxin, a, b, d toxins, enterotoxin B, lipases and nucleases (Balaban, N. et al., Proc. Natl. Acad. Sci. USA 92:1619-1623 (1995)). These proteins are members of the histidine protein kinase family of regulators and control a number of virulence determinants (Balaban supra, Novick R P, Meth Enzymol. 204: 587-637 (1991)).

[0289] Compared to wild-type, agr and hld mutants have decreased synthesis of extracellular toxins and enzymes (such as a-, b-, and g-hemolysins, leucocidin lipase, hyaluronate lyase and proteases) while having increased synthesis of coagulase and protein A. The agr gene consists of two divergent transcriptional units driven by promoters named P2 and P3. The P2 transcript includes four open reading frames referred to as agrA, B, C, and D, all four of which are required to for the agr response.

[0290] The peptides predicted for agrA and agrC resemble the response regulators and signal transducers of the two-component bacterial signal transduction systems. The primary function of thee four genes discussed above is to activate two promoters; the P3 transcript, RNAIII, however is the actual effector of the exotoxin response. RNAIII activates transcription of secretory protein genes and represses transcriptions of surface protein genes. As a global regulatory system, agr, controls the post-exponential production of exoproteins such as toxins, hemolysins, and exoenzymes. agr is a complex polycistronic locus that encodes a two-component signal transduction pathway that activates transcription of a regulatory RNA molecule that in turn activates transcription of the exoprotein genes. Thus, transcriptional regulation of the enterotoxin B gene as well as SED, SEC and staphylococcal capsular polysaccharide gene involves the agr product. (agr does not regulate SEA expression).

[0291] The promoter region of SEA is localized by primer extension analysis. The 5′-end of SEA mRNA is localized 86 bp upstream of the translational initiation codon. A DNA region with good agreement with canonical promoter sequences was observed beginning 8 base pairs upstream of the apparent transcriptional start site. No DNA upstream of the 35 bp region is required for transcription. Both the agr gene and the SEA promoter have been cloned (Peng, H. L. et al., J. Bacteriol. 170:4365-4372 (1988); Borst, D. W. et al., Infec. Immun. 61:5421-5425 (1993)). The xpr locus and the agr locus interact at the genotypic level; agr is autoinduced by a proteinaceous factor produced and secreted by the bacteria and is inhibited by a peptide from an exotoxin-deficient S. aureus mutant strain. The inhibitor, RIP, competes with the activator, RAP. When given as a vaccine, RIP may prove useful as a direct inhibitor of virulence.

[0292] A chromosomal locus (sar) distinct from agr, encodes a DNA-binding protein that is important in regulation, and is required for expression of S. aureus exoproteins including enterotoxin, toxic shock syndrome toxin, hemolysin and staphylokinase. Transcription of Protein A is suppressed by sar and agr. A list of plasmids containing bacterial virulence factors useful in this invention is disclosed in Table 49, p. 223 of Patrick, S. et al., Immunological and Molecular Aspects of Bacterial Virulence, John Wiley and Son, New York, N.Y. 1995.

[0293] This invention contemplates the use of the Staphylococcal enterotoxin promoters and transcription factors that activate the enterotoxin biosynthetic cycle. Several Staphylococcal promoters have been identified (Novick, supra). This invention also contemplates the use of the peptide activator RAP which induces agr as well as the peptide inhibitor RIP which induces or represses RNA III.

[0294] SAg-encoding nucleic acid is fused in-frame with Staphylococcus agr nucleic acid and introduced into tumor cells or accessory cells (or the two are cotransfected into these cells). In another embodiment, SAg-encoding nucleic acids placed under the control of an enterotoxin promoter, and this construct is introduced into tumor cells or accessory cells. The agr gene is especially useful because it can be linked to an inducible promoter such as that for corticosteroids or the metallothionein promoter, allowing it to be activated in a controlled manner by exogenous administration of the inducing to the host.

[0295] Methods for introducing the above genes into tumor cells are described in Example 1, 2, 11. The use of such cells in vivo as preventative or therapeutic vaccines are discussed in Examples 15, 16, 18-23. Use of these genetically transformed tumor cells ex vivo to induce effector T or NKT cells for adoptive immunotherapy is described in Examples 2, 3, 7, 15, 16, 18-23.

[0296] 27. Combining SAg with Oncogenes, Protooncogenes, Amplified Oncogenes, Transcription Factors or Tumor Markers

[0297] In one embodiment, the nucleic acid encoding a SAg is fused in-frame to oncogene or protooncogene nucleic acid in tumor cells or accessory cells to produce a chimeric nucleic acid which is expressed in, or on the surface of, the cell. This fused gene may be rendered inducible by judicious choice of a promoter or other regulatory sequence. Preferably, such an inducible promoter is induced by a hormone or a metal. A regulatory element, such as one activated by interferon or a cytokine (e.g., Jak or a STAT), may be included in this construct.

[0298] In another embodiment, the nucleic acid encoding SAg is fused in frame to nucleic acid encoding an oncogene which can be amplified markedly. The fused construct is introduced into tumor cells or accessory cells. An amplified “unit” is initially much larger than the size of the actual gene of importance to the oncogenic event(s) (Hellems, R E, Gene Amplification in Mammalian Cells, Marcel Dekker, New York, N.Y. ). Thus a silent gene is co-amplified with one or more genes expressed on an amplicon. This is a preferred site for the inserting gene clusters wherein one gene encodes a SAg, others encode the enzymes of LPS lipid A biosynthesis, optionally together with their native promoters or operons.

[0299] Transcription Factors and Amplified Oncogenes

[0300] Oncogenes are frequently amplified in human tumors and cultured cancer cells. This is more characteristic of solid tumors and relatively rare in lymphoid malignancies. DNA amplification was first observed cytogenetically a double minute chromosomes (DMs) or homogeneously staining regions (HSRs) but today, direct DNA analysis (Southern blotting) or molecular cytogenetic methodologies, such as fluorescence in situ hybridization (FISH) and comparative genomic hybridization (CGH) can be applied. DMs are episomal forms of amplified DNA that generally lack centromeres and are unequally distributed between daughter cells at mitosis. They appear as isodiametric extrachromosomal bodies stainable with all chromatin dyes. HSRs are chromosomally integrated forms of amplified DNA. They represent either the replacement of the normal chromosome banding pattern with an extended region of homogenous staining or the insertion of such a region into an otherwise normally banded chromosome. DMs and HSRs tend to be mutually exclusive and are potentially interchangeable manifestations of the amplified DNA. Thus, DMs can potentially integrate into distant chromosomal sites to generate heritable HSR. Of 22 human tumors analyzed, 91% contained DMs only, 6.5% contained HSRs and 2.5% contained both. In solid tumors of epithelial origin, DMs and HSR were found in 40% of breast carcinomas, 17% of non small cell carcinoma of the lung, 18% of stomach and esophageal cancers and 15% of uterine carcinomas.

[0301] The overwhelming majority of oncogene amplifications in human tumors affect the Myc oncogene family. In small cell lung cancers all three members of the Myc family, c-myc, N-myc and L-myc can be involved. Myc amplification is associated with a more invasive and more metastatic phenotype. N-myc amplification is seen in neuroblastoma and is associated with the late stages and poor prognosis. The amplification units on chromosome 11q13 are seen in (a) breast cancer, (b) squamous cell carcinoma of the head and neck, lung, and esophagus and (c) bladder tumors. The amplification extends for over 1.5 megabase pairs of DNA and includes two bona fide oncogenes: FGF3 and FGF4. It also includes the Bcl-1 CCND1 (cycln D1) as well as the EMS 1 gene that encodes the human homologue of cortactin. CCND1 has a critical role in amplified DNA since its expression is increased as a consequence of amplification. The other major targets for amplification are the genes encoding the EGF receptor (ErbB1/Her1) and the related ErbB2/Her2. Both genes are amplified in breast cancer and other malignancies. ErbB2 is associated with estrogen receptor-negative breast cancers and poor prognosis.

[0302] Members of the myc gene family are activated in several human tumors as a result of DNA rearrangements through chromosomal translocations or gene amplification. When overexpressed, all myc genes complement mutant c-ras oncogenes in the transformation of primary rat embryonic cells and transform Rat 1-A cells without assistance of other oncogenes. Stimulation of cellular myc expression levels or changes in post-translational modification of myc proteins have been following exposure of cells to many growth promoting stimuli. These features suggest that the myc proteins participate in the final steps of mitogenic signal transduction. The myc proteins act as transcription factors involved in activation and/or repression of target genes. In neuroblastoma, a group whose tumors are generally near diploid or tetraploid with chromosome 1p deletion(LOH) and N-myc amplification have a generally poor response to treatment and a poor prognosis. Genomic amplification of the N-myc cellular oncogene is present in approximately 40% of cases of childhood neuroblastoma and correlates with histopathological signs of advanced disease. This genomic N-myc amplification appears to be associated with tumor progression rather than tumor initiation since early stage tumors rarely exhibit M-myc genomic amplification. Similarly the c-myc family of protooncogenes including N-myc and L-myc are amplified in small cell carcinoma of the lung.

[0303] The amplified oncogenes useful in the present invention include genes encoding transcription factors. The preferred nucleic acids for use in the present invention are c-myc, N-myc, c-abl, c-myb, c-erb, c-Ki-ras, N-ras. N-myc (amplified 5-1000 fold in neuroblastoma) is preferred. SAg-encoding nucleic acid is cotransfected into tumor cells or accessory cells with amplified oncogenes. The N-myc and L-myc genes have been cloned as c-myc homologous amplified oncogenes from human tumors. In one embodiment, SAg-encoding nucleic acid is fused in frame with nucleic acid encoding oncogenic transcription factors such as FOS, JUN, MYC, MYB and ETS. In another embodiment, such nucleic acid is cotransfected with SAg-encoding nucleic acids. Either of such constructs is introduced into tumor cells or accessory cells. Proteins that interact with FOS and JUN are given in Table 1 p. 157 of Peters G et al., Oncogenes and Tumor Suppressors, Oxford University Press, Oxford UK 1997, incorporated by reference. bcr/abl Gene

[0304] SAg-encoding nucleic acid is fused in frame or cotransfected with nucleic acids encoding the following agents and transfected into tumor cells and fused to oncogenic nucleic acids encoding chimeric proteins capable of immunizing the tumor bearing host. An ideal candidates for such fusions is the bcr-abl gene which express the bcr/abl protein in chronic myelogenous leukemia (CML). The c-abl oncogene is amplified in chronic myelogenous leukemia. Scherle P A et al., Proc. Natl. Acad. Sci. USA 87: 1908-1917 (1990) Heisterkamp N et al., Nature 344: 251-253 (1990). Abnormalities in the structure and expression of the human c-abl cellular oncogene have been associated with Philadelphia chromosome-positive CML which is present in more than 90% of cases. This aberrant chromosome marker is generated by a reciprocal translocation between chromosomes 9 and 22 in which the c-abl oncogene is translocated from the distal end of the q arm of chromosome 9 to a relatively restricted 5-6kb region on chromosome 22 termed the breakpoint cluster region (bcr). This translocation creates a fusion gene that is transcribed as an 8 kb bcr-abl RNA that encodes the aberrant bcr-abl fusion protein product (P210) observed in CML cells. The bcr-abl fusion product has enhanced tyrosine kinase activity compared with the normal p145 c-abl product. Abnormalities in the structure and expression of the c-abl cellular oncogene have not been described in any type of human malignancy other than CML and Ph positive acute lymphatic leukemia. Gene amplification correlates with progression of malignancy.

[0305] EGF Receptor Genes

[0306] SAg-encoding nucleic acid is fused in frame to the nucleic acids encoding the EGF receptor (EGFR) (Ulrich A et al., Nature 309: 418-421 (1984)). The EGFR is the prototype of four-member receptor family. EGFR is frequently overexpressed or mutated in several different types of human tumor. For instance, the EGFR is amplified in 20-40% of human glioblastomas and a variety of epithelial tumors including head and neck squamous cell carcinomas, breast tumors, esophageal tumors and urogenital tumors. Amplification was accompanied by overexpression of the EGFR.

[0307] The erbB2 (her2/neu) Oncogene

[0308] SAg-encoding DNA is fused in frame to DNA encoding a tumor marker such as PSA, c-erbB2(neu), her2/neu, bcl-2 and Brca-1. The principal amplified and functional genes in breast cancer are the growth factor receptor-erbB2, the nuclear transcription factor c-myc, and the genes encoding cell cycle kinase regulatory genes termed cyclin D1 and cyclin EG. Gene amplification is thought to proceed via the initial formation of extrachromosomal, self replicating units (double minute chromosomes) that become permanently incorporated into chromosomal regions where they are called homogeneously staining regions (HSRs) as described above.

[0309] The human counterpart of the oncogene neu known as her2 encodes a protein of the same family as the EGFR. This family of genes has been cloned. Its products belong to a family of receptor tyrosine kinases each with a transmembrane domain, a cysteine-rich extracellular domain and an intracellular catalytic domain. They act as receptors for several peptide growth factors such as EGF, TGF( and neuregulins. The activated receptors are then able to bind to proteins containing src-homology-2 (SH2) domains. The SH2 domain proteins recognize and bind to specific phosphotyrosine-containing sequences of the activated receptor. These SH2 containing adapter molecules then trigger downstream signalling pathways, ultimately resulting in gene activation.

[0310] The erbB2 (neu/Her2) gene maps to chromosome 17p21 and codes for a 185 kDa transmembrane glycoprotein related to, but not identical to the EGF receptor (Schechter A L et al., Science 229: 976-978 (1985), Bargmann C L Nature 319: 226-230 (1986), Hung M C et al., Proc. Natl. Acad. Sci. USA 83: 261-264 (1986), Yamamoto T et al., Nature 319: 230-234 (1986)). The EGFR bears sequence homology with the erbB1 product. The erbB2 gene is activated by a point mutation which mutates amino acid residue 664 from valine to glutamic acid; this change is associated with transforming its ability. The genes are called erbB, (erbB1, EGFr), erbB2, (neu/Her-2), erbB3( HER-3) and erb B4 (HER-4).

[0311] Amplification and overexpression of erbB2 has been found in a variety of human tumors including carcinomas of the breast, ovaries, colon, lung, liver, stomach, kidney, esophagus, salivary gland, and bladder. Genomic amplification of the neu (C-erb-2) or HER2 cellular oncogene and protein overexpression has been documented in approximately 30% of primary human breast cancers and may correlate with advanced disease and a relatively poor prognosis. More than 50% of all ductal carcinomas in situ of the large cell type express BER2. Amplification occurs in approximately 20% of invasive breast carcinomas. Thus, it is thought that HER2 amplification increases the growth rate but not the metastatic potential of tumor cells.

[0312] A third member of the EGFR family is ERBB3which is present in some human breast cancers with high expression correlating with lymph node metastases. Overexpression of ERBB3 has been observed in epidermoid carcinoma of the larynx and esophageal carcinoma. ERBB4, a fourth member of the EGFR family, was overexpressed in a human mammary tumor cell line. Fisk et al. (J. Exp. Med. 181: 2109-2117 (1995)) described an immunodominant epitope of HER/neu that is recognized by ovarian tumor-specific cytotoxic T lymphocytes. This epitope is useful in this invention. Failure of coexpression of a heterodimeric partner or coinduction of a suppressor phosphatase would explain the lack of immunogenicity of c-erbB2 in mice in nude mice.

[0313] Additional oncogenes, protooncogenes and tumor markers which would be candidates for the fusion in accordance with this invention are w PSA, c-erb B2(neu), Her2/neu, bcl-2, Brca-1. Viral and non-viral oncogenes and protooncogenes which are overexpressed in tumor cells are shown in Table 9.2 and 9.1, p. 171-172 of Franks et al., supra). The functions of the various oncogenes is shown in Table 9.6, p. 186, of Franks et al.

[0314] IGF Receptor Genes

[0315] SAg-encoding nucleic acid is fused in frame with nucleic acids encoding insulin-like growth factor (IGF) receptors (IGFRs)and transfected into tumor cells. The IGFR gene is a tyrosine kinase containing transmembrane protein that plays an important role in cell growth control. There is a single IGF 1 receptor gene with a complete coding sequence contained in 21 exons (Abbott A M et al., J. Biol. Chem. 267: 10759-10763 (1992); Scott J et al., Nature 317: 260-262 (1985); Liu J et al., Cell 75: 59-63 (1993)). IGF1R is expressed at high levels in breast cancer, and amplification of the IGF1R gene has been observed. IGFs play a significant auxiliary role in tumor growth by suppression of apoptosis. The apoptotic effect overexpressed myc is overcome by IGFs. Thus, IGFs facilitate tumor growth by suppression of apoptosis.

[0316] Fibroblast Growth Factor (FGF) Receptor Genes

[0317] SAg-encoding nucleic acid is fused in frame to nucleic acids encoding fibroblast growth factors receptors (FGFs) and transfected into tumor cells. FGF receptor are also be important for the vascularization of certain types of tumors. The expression of FGF1 has been shown to be associated with a switch to an angiogenic phenotype during the development of a fibrosarcoma. Overexpression of FGF receptor by certain tumors may also contribute to their growth. FGF receptors have been shown to be amplified in some breast cancers.

[0318] Platelet Derived Growth Factor (PDGF) Receptor Genes

[0319] SAg-encoding nucleic acid is fused in frame to nucleic acids encoding additional tumor growth factors which are produced or overexpressed and transfected into tumor cells or accessory cells. Growth factors include those in the tyrosine kinase receptor families such as Platelet Derived Growth Factor A and B family (PDGF). PDGF A and B receptors are amplified in malignant glioblastomas in the malignant cells themselves or the stromal cells (Fleming T P et al., Cancer Res. 52: 4550-4556 (1992);Kumabe T et al., Oncogene 7: 627-632 (1992)). The nerve growth factor (NGF), stem cell factor receptor (kit), colony stimulating factor-1 receptor (fms), neurotropin receptor family, transforming growth factor b family, the WNT family, angiogenic receptors

[0320] Other Amplified Oncogenes

[0321] SAg-encoding nucleic acid is also fused to nucleic acid encoding the tyrosine protein kinases which are both membrane associated and transmembrane as described in Table 9.4, p. 179 of Franks et al., supra. Additional chromosomal regions which are amplified in greater than 40% of cases included the 8q24 locus of the c-myc(O) gene, the 11q13 locus of the cyclin D (O), int2 (O), EMS-1 (O), BCL-1 (O), FGF-4 (O) GST (M), MEN1(S) genes, the 17q21 locus of the RARa (S), RARg (S), ERBAa (S), BRCA1 (S), NM23 (S), estradiol 17B dehydrogenase (S) ERG2 (O), HOX2, NGFR (O), WNT3 (O) and the 20q13 locus.

[0322] Nucleic acid encoding SAg is fused or cotransfected into tumor cells with nucleic acid encoding the above oncogenes, amplified oncogenes and protooncogenes, transcription factors and growth factor receptors. These transfectants are prepared as in Examples 1. They are useful in vivo as a preventative or therapeutic vaccine (Examples 15, 16, 18-23). They are also useful ex vivo for inducing tumor specific effector cells for adoptive immunotherapy (Examples 2-5, 7, 15, 16 18-23).

[0323] 28. Combining SAg with Angiogenic Receptors and Growth Factor Receptors

[0324] SAg-encoding nucleic acid is cotransfected or fused in frame to nucleic acid encoding an angiogenic receptor such as VEGF and transfected into tumor cells. SAg nucleic acid is also fused to or cotransfected with nucleic acid encoding other angiogenic receptors such as V integrin, other integrins, cadherins or selectins and introduced into tumor cells or accessory cells. SAg-encoding nucleic acid is also cotransfected into tumor cells or accessory cells with nucleic acids encoding angiogenic proteins such as VEGF.

[0325] VEGF is produced by tumor cells and stroma, and its expression correlates with the degree of vascularization and grade of malignancy. VEGF receptors, termed KDR and flt, are expressed mainly by the tumor endothelium. Higher levels of VEGF are found in metastatic than in non-metastatic colon cancers (Tischer E et al., J. Biol. Chem. 266: 11947-11954 (1991). VEGF is especially useful here because it is overexpressed in tumor cells at an early stage of tumorigenesis. The promoter of the VEGF gene lacks a TATA box, but has six GC boxes for transcription factor SP-1 binding and also a site for AP-1 and AP-2 binding.

[0326] The expression of the gene is modulated by several growth factors such as EGF. In some cell types VEGF expression is regulated by IL-1, FGF, PDGF. A common element, mediation of protein kinase C in the regulation of VEGF, has been suggested. VEGF is expressed as a disulfide linked dimer. Long and short forms are generated by alternative splicing and are matrix bound or released, respectively. As a result of its specific effects on endothelial cell migration and proliferation, VEGF is a very potent and specific promoter of angiogenesis. Two well characterized families of angiogenic factors act by binding to tyrosine kinase receptors that have two or three immunoglobulin-like domains, and VEGF binds to two related receptors with seven immunoglobulin-like extracellular domains.

[0327] The TRKA oncogene codes for a receptor for nerve growth factor (NGF). The TRKA gene has been found fused to genes that code for proteins that form dimers in cells leading to the synthesis of a constitutively dimerized and active tyrosine kinase. TRKA may have a tumor suppressor function since its expression in neuroblastoma correlated inversely with n-myc gene amplification. Coexpression of mRNA for TRKA and the low affinity NGF receptor in neuroblastoma correlated with a favorable prognosis.

[0328] Nucleic acid encoding SAg is fused to nucleic acid encoding the above angiogenic factors or receptors and introduced into tumor cells; alternatively, the two nucleic acids are used to cotransfected tumor cells. These transfectants are prepared as in Example 1. They are useful in vivo as a preventative or therapeutic antitumor vaccine (Examples 15, 16, 18-23). They are also useful ex vivo for inducing tumor specific effector cells for adoptive immunotherapy of cancer (Examples 2-5, 7, 15, 16 18-23).

[0329] 29. Combination of SAg with Cell Cycle Protein

[0330] SAg-encoding nucleic acid is fused in frame to nucleic acid encoding a cell cycle protein such as a cyclin which is overexpressed in tumor cells. Examples of these cell cycle proteins which are preferred for such fusions are Cyclins A, B, D1, E. These proteins are generally complexed to kinases or transcription factors at critical checkpoints in the cell cycle. The cyclins, CDKs and their inhibitors are shown in Table 1. p193 of Peters G et al., supra.

[0331] In another embodiment, nucleic acid encoding SAg is cotransfected into tumor cells with nucleic acid encoding a cell cycle protein as above. These transfectants are prepared as in Examples 1. They are useful in vivo as a preventative or therapeutic antitumor vaccines (Examples 15, 16, 18-23). They are also useful ex vivo for inducing tumor specific effector cells for adoptive immunotherapy of cancer (Examples 2-5, 7, 15.16 18-23).

[0332] 30. Combining SAg with Tumor Suppressor Genes, p53 or Developmental Genes

[0333] SAg-encoding nucleic acid is fused in frame with tumor suppressor gene DNA and the fused nucleic acid is introduced into tumor cells or accessory cells. Alternatively, the two nucleic acids are used to cotransfected these cells. Examples of such tumor suppressor genes are shown in Table 9.7 p. 187 of Franks L M et al., supra. Examples of mutated tumor suppressor genes include the APC and MCC genes and their isoforms, the DCC gene in colon cancer, the BRCA1 tumor suppressor gene in breast cancer and the DPC gene in pancreatic cancer. The p53 gene and its mutations are also useful in this embodiment. A list of p53 responsive elements and associated proteins useful in this invention is given in Tables 1 and 2 pp. 267-269 of Peters G et al., supra.

[0334] In another embodiment, nucleic acid of developmental genes is used in place of tumor suppressor or p53 genes. Examples of such developmental or differentiation genes are wnt and fwt genes.

[0335] Transfectants are prepared as in Example 1. They are useful in vivo as a preventative or therapeutic antitumor vaccine according to Examples 15, 16, 18-23). They are also useful ex vivo for inducing tumor specific effector cells for adoptive immunotherapy of cancer (Examples 2-5, 7, 15, 16, 18-23).

[0336] 31 . Combining SAg with Cell Surface Glycoproteins or their Receptors

[0337] SAg-encoding nucleic acid is fused in frame with a nucleic acid encoding a cell surface glycoprotein and or its receptor and the fused nucleic acid is introduced into tumor cells or accessory cells. Alternatively, the two nucleic acids are used to cotransfected these cells. Examples of these glycoproteins or receptors include integrins, vitronectin receptors, laminin receptors, cadherins, tenascin and CD44 and isoforms, VCAM-1, P-Selectins, E-Selectin, NCAM and MCAM. Transfectants are prepared as in Example 1. They are useful in vivo as a preventative or therapeutic antitumor vaccine according to Examples 15, 16, 18-23). They are also useful ex vivo for inducing tumor specific effector cells for adoptive immunotherapy of cancer (Examples 2-5, 7, 15, 16 18-23).

[0338] 32. Combining SAg with Cytokines and Chemokines and Chemokine Receptors

[0339] SAg-encoding nucleic acid is fused in frame with nucleic acid encoding a cytokines and chemokines, and the fused nucleic acid is introduced into tumor cells or accessory cells. Alternatively, the two nucleic acids are used to cotransfected these cells. Examples of chemokines and cytokines that are useful herein include RANTES, IL-5, IL-7, IL-12, IL-13, IFN(, TNF( and TNF(. Chemokines are small (typically 6-10 kDa) peptides that have been divided into two classes designated C-C and CXC based on the sequence of the first two cysteine residues. The two families exhibit preferences for different target cell types: C-C chemokines act primarily on macrophages.

[0340] Chemokine gene expression is induced by the action of other growth factors and cytokines and are actively expressed in solid tumors showing inflammatory involvement and macrophage or neutrophil invasion. Chemokines of the C-X-C class containing the amino acid sequence motif ELR have demonstrable angiogenic activity which can be inhibited by C-X-C chemokines lacking the ELR motif. Therefore chemokine expression by either tumor cells themselves or elicited from stromal cells by the action tumor-derived growth factors, have the potential to regulate tumor growth by modulation of angiogenesis. G-CSF is a growth factor for granulocyte precursors, and IL-2 is a growth factor for T cells. Nucleic acids encoding SAgs are fused or cotransfected into tumor cells with nucleic acids encoding the above cytokines, chemokines and chemoattractants. The transfectants are prepared as in Example 1. They are useful in vivo as a preventative or therapeutic antitumor vaccine according to Examples 15, 16, 18-23). They are also useful ex vivo for inducing tumor specific effector cells for adoptive immunotherapy of cancer (Examples 2-5, 7, 15, 16 18-23).

[0341] Chemokine Receptors

[0342] Previously we showed that 4T1 mammary carcinoma cells transfected with superantigens and CD80 molecules could be used therapeutically to reduce the number of established lung metastases and prolong survival in a murine model of post surgical mammary carcinoma ( Pulaski, B. A., Terman, D. S. et al., Cooperativity of Staphylococcal aureus Enterotoxin B Superantigen, Major Histocompatibility Complex Class II, and CD80 for Immunotherapy of Advanced Spontaneous Breast Cancer in a Clinically Relevant Postoperative Mouse Breast Cancer Model, Cancer Research 60: 2710-2715 (2000)). It is believed that the superantigen transfected tumor cells, administered parenterally to the tumor bearing hosts, traffic to organs which are colonized by metastatic tumor cells. At these sites, the tumor cell transfectants secrete superantigen which induces a powerful local T cell inflammatory tumoricidal response.

[0343] The present invention aims to enhance the targeting of the superantigen transfected tumor cells to metastatic sites. This is accomplished by cotransfecting the tumor cells with nucleic acids encoding superantigens and chemokine receptors including but not limited to CXCR4 (SEQ ID NO:37). It has been shown previously that tumor cells expressing CXCR4 will metastasize to organs with a natural abundance of the ligand for CXCR4. For breast carcinoma, this includes organs which are rich in CXCL12 the natural ligand for the CXCR4 receptor.

[0344] While the CXCR4/CXCL12 system is exemplified here, any other chemokine receptor which is expressed in tumor cells and contributes to the metastatic colonization of organs rich in its receptor ligand could be used.

[0345] The gene for the CXCR4 receptor has been identified (Wegner S A et al., J. Biol. Chem. 273: 4754-4760 (1998); Caruz, A M et al., FEBS Lett. 426: 271 (1998); Frodl, R. et al., J. Receptor Signal Tranduct. Res. 18: 321 (1998)). The DNA or RNA encoding the chemokine receptor and a superantigen are cotransfected into tumor cells by methods given in Example 1. The transfected cells are tested in the 4T1 model of metastatic carcinoma in BALB/c female mice as described by Pulaski and Terman et al., Cancer Res. 60: 2710-2715 (2000). Alternatively, the SCID mouse model of established breast cancer using superantigen and chemokine receptor transfected into MDA-MB-231 human breast carcinoma cells as the therapeutic agents described by (Muller A. et al., Nature 410: 50-56 (2001) is used.

[0346] Superantigen and chemokine receptor transfected dendritic cells (using RNA or DNA encoding superantigens and chemokine receptors) are used to promote their migration and colonization of metastatic tumor sites. Once localized to tumor, the transfected dendritic cells phagocytose tumor cells and present them together with expressed superantigen to the T cells which then effect a potent T cell inflammatory tumoricidal response. In addition to tumor cells and dendritic cells mentioned above, other antigen presenting cells, accessory cells such as fibroblasts and macrophages are useful. Epithelial cells or organ-specific cells which express chemokine receptors are useful for tranfection of superantigen nucleic acids.

[0347] The therapeutic system may comprise individual or mixed populations of tumor cells or accessory cells transfected with nucleic acids or RNA encoding superantigens and chemokine receptors as well as costimulatory molecules such as CD80, and MHC class II. The optimal therapeutic combinations consists of at least one population (at least 50%) consisting of tumor or accessory cells cotransfected with superantigens and chemokine receptor(s) together with a second cell population of tumor cells and/or accessory cells cotransfected with MHC class II and CD80 or other costimulatory molecule. The epithelial cells or organ specific cell types stipulated above may be substituted for the tumor cells or accessory cells in this system.

[0348] The transfectants are administered parenterally by infusion or injection according to the protocol of Pulaski, B A, Terman D S et al. Cancer Res. 60: 2710-2715 (2000). The number of metastases in the lungs as well as survival of experimental and control mice are determined as given by Pulaski, B A, Terman, D S et al. Cancer Res. 60: 2710-2715 (2000).

[0349] 33. Combining SAg with Transcription Factors AP-1 and NFkA

[0350] Transcription factor genes may act as oncogenes. The jun family of transcription factors bind specifically to AP-1 sites which confer the effects of potent tumor promoting phorbol esters on responsive genes and specifically bind to c-jun homodimers or c-jun/c-fos heterodimers v-rel encodes members of the NF-kB family of transcription factors. Transforming oncogenes such as v-ets and v-myb also encode transcription factors.

[0351] The T cell signaling system responding to SAgs activates the JAK, TNF (TRAF), IL-2 and IL-12 pathway probably via NFkA activation. LPS has a T cell stimulating effect and may fuse with SAg to produce additional stimulation or epitope expansion. The NFA nucleic acids are fused to a promoter which activates sequences encoding the SAg receptor or the sequences encoding the key Vβ domains binding SAgs or regions in the Vβ receptor which are activated by the SAgs.

[0352] SAg-encoding nucleic acid is fused in frame with nucleic acids encoding a transcription factor such as those above. Transfectants are prepared as in Example 1. These transfectants are prepared as in Example 1. They are used in vivo as a preventative or therapeutic antitumor vaccine according to Examples 15, 16, 18-23). They are also used ex vivo for inducing tumor specific effector cells for adoptive immunotherapy of cancer (Examples 2-5, 7, 15, 16 18-23).)

[0353] 34. SAgs Augment the Immunostimulatory Effects of Tumor Associated Peptides. Binary and Ternary Complexes

[0354] Bacterial SAg are presented to T cells via the MHC class II molecule by multiple low affinity attachments, resulting in stimulation of the T cell with very low concentrations of antigen. SAgs augment the presentation of antigenic peptides to T cells without sterically interfering with each other's ability to bind and activate the TCR. These augmenting peptides are incorporated into the SAg structure.

[0355] SAgs may also bind to binary or ternary complexes of tumor peptide-MHC class I or tumor peptide-MHC class II complexes, either in solution or affixed to a TCR or the surface of an APC.

[0356] In one embodiment, the SAg is first bound to APCs or T cells followed by addition of complexes between MHC class I or class II and tumor peptide. Alternatively, the SAg may first bind to either cell-bound, soluble or immobilized MHC class I or class II molecules, after which the tumor peptide is added. This trimolecular complex is then presented to the T cell via the TCR.

[0357] In another embodiment, SAg is first bound to an APC or to a TCR Vb chain on an NKT cell. Following this, CD1-glycosylceramide complexes are added and allowed to bind to NKT cell TCR Vb chain. SAg may be bound to first to CD1-glycosylceramide complexes in soluble form, affixed to CD1+ cells or NKT cells via the TCR. SAgs may be bound to CD1 complexes with glycosylceramide or a glycosphingolipid (with a conserved SAg binding site) in solution or when fixed to CD1+ cells or NKT cells. Alternatively, SAgs are bound to ternary complexes consisting of CD1-glycosylceramide affixed to the NKT cell TCR or bound to CD1-glycosylceramide on APCs, in solution or immobilized, before it has affixed to the NKT TCR. SAg is alternatively bound to binary complexes of (a) CD1-glycosylceramide, (b) CD1-glycosphingolipid, (c) CD14-LPS or (d) MHC-tumor peptide complexes that have either a SAg receptor sequence or a TCR Vβ SAg-binding sequence.

[0358] The complexes described above are used in vivo as preventative or therapeutic antitumor vaccines according to Examples 4, 15, 16, 18-23. They are also used ex vivo for inducing tumor specific effector cells that are then taken for adoptive immunotherapy of cancer. (See Examples 2-5, 7, 14, 15, 16 18-23).

[0359] 35. SAgs Combined with Products of Antigen Processing Pathways

[0360] A chimeric gene is prepared consisting of SAg-encoding nucleic acid fused in frame to nucleic acids encoding (a) the endoplasmic reticulum (ER) translocation signal peptide, (b) transmembrane domain, and (c) lysosomal targeting domain of LAMP-1. LAMP-1 is a type 1 transmembrane protein localized predominantly to lysosomes and late endosomes. The cytoplasmic domain of LAMP-1 contains the Tyr-Gln-Thr-Ile sequence that mediates the targeting of LAMP-1 into the endosomal and lysosomal compartments. The specific targeting of the SAg to the endosomal and lysosomal compartments allows SAg peptides to complex with MHC class II molecules and enhance presentation.

[0361] The MHC class I presentation pathway operates on a three level system. At one level there is protein machinery dedicated to peptide manufacture—the proteosome complex. The selective peptide transporters deliver antigens into the ER. The class I molecules themselves exhibit variable affinities for peptides. Genes clustered in the region of the class II gene encode proteosome and transporter. SAg peptides are transported into the ER—primarily through a transmembrane “tube” consisting of two polypeptide chains called TAP-1 (SEQ ID NOS:40-41) and TAP-2 (transporter associated with antigen processing). In mammals, genes encoding TAP-1, TAP-2 and two proteosome polypeptides are all located within the class II region of the MHC.

[0362] The class I pathway starts in the cytosol where proteins produced inside the cell are degraded by the multicatalytic proteosome complex. The peptide products are translocated into the ER by the TAP proteins. In the lumen of the ER, the peptides bind the class I protein groove while the latter are complexed with the chaperone p88, β₂M and TAP. After securing a peptide in its binding groove, the class I complex is released from TAP and transported through the Golgi apparatus to the cell surface. TAP genes are closely linked to the LMP2 (SEQ ID NOS:38-39) and LMP7 in the class II MHC gene cluster and belong to a family of molecules involved in ATP-dependent membrane translocation known as the ABC (ATP-binding cassette) transporters. TAP1 and TAP2 function as a heterodimer each subunit having over 500 amino acids each with two hydrophobic domains, six membrane spanning regions and a cytosolic ATP binding motif. Both TAP1 and TAP2 subunits are required for peptide binding and translocation. TAP1 appears to be uniquely involved in the interactions with class I/b2 dimers at the luminal membrane of the ER where it interacts with the membrane proximal region of the a3 domain of class I-b2m complexes prior to peptide loading. Interaction between class I and TAP is crucial for efficient peptide loading. Antigen presentation is mediated by an additional factor, tapasin. TAP also binds 2M independently of class I heavy chain, perhaps facilitating rapid assembly of class I peptide-binding complexes. TAP heterodimer may show a preference for amphipathic molecules as T cell antigenic determinants are often seen clustered around sequences where amphipathic helical structures are predicted. TAP prefers peptides 8-10 residues in length but may transport peptides ranging from 740 residues.

[0363] Invariant chains are transmembrane glycoproteins found in intracellular compartments in association with class II molecules. Multimers consisting of three class I ab dimers and three invariant chains assemble rapidly in the ER and travel across Golgi bodies to the trans-Golgi network that intersects with the endocytic pathway, where class II molecules reside for about 1-3 hr before transit to the cell surface for display to T cells. Alternative splicing of the invariant transcripts produces two isoforms p31 and p41 both of which can operate to assist folding of class II dimers, direct the passage of class II from the ER through an exocytic pathway, and block loading of peptide until peptide sampling can occur as exocytic-endocytic pathways intersect. A four residue targeting signal at the N-terminus of the invariant chain that is essential for intracellular transport to endosomal compartments. The C-terminus and the transmembrane region or the invariant chain are also necessary for sorting of class II-invariant chain complexes to the endosome. p41 appears to regulate the production of a stable 12-kDa SLIP-class II complex capable of enhancing SAg presentation.

[0364] SAg-encoding nucleic acid is fused in frame with nucleic acid encoding a protein involved in the antigen processing pathway such as the invariant chain or TAP which facilitates the expression of the SAg in the context of MHC class I and II, respectively. Tumor cells, accessory cells and hybrids thereof are transfected with fused SAg-invariant chain DNA as in Examples 1 and 5. They are used in vivo as a preventative or therapeutic antitumor vaccine according to Examples 15, 16, 18-23. They are also used ex vivo for inducing tumor specific effector cells for adoptive immunotherapy of cancer (Examples 2-5, 7, 15, 16 18-23).)

[0365] SAg polypeptide post translationally is fused or associated with additional molecules such as mono and diglycosylceramides, including but not limited to -anomeric mono- and digalactosylceramides GalCer, a-Gal, glycosylated and prenylated SAgs. These constructs translocate with the appropriate trafficking molecule e.g., invariant chain, TAP, LMP, to selected surface receptor such as MHC class I, MHC class II or CD1. These transfectants are prepared as in Example 1. They are useful in vivo as a preventative or therapeutic antitumor vaccine according to Examples 15, 16, 18-23. They are also useful ex vivo for inducing tumor specific effector cells for adoptive immunotherapy of cancer (Examples 2-5, 7, 15, 16 18-23).

[0366] 36. SAgs Combined with Signal Transduction Molecules or Heat Shock Proteins (HSPs)

[0367] SAg-encoding nucleic acid is fused in frame to (or cotransfected with) a nucleic acid encoding “signal transduction molecules” such as Ras, JAK 1 and STAT-1a and heat shock proteins HSP-60, HSP-70, HSP-90a, HSP-90b, Cox-2 as well as heterotrimeric G proteins and ATPases. The genes for Staphylococcal HSP-70 (SEQ ID NOS:42-43) useful in this invention have been cloned (Ohta, T et al., J. Bacteriology 176: 4779-4783, (1994)). As used herein, SAg polypeptides are ligated to any of above structures at the peptide or nucleic acid level. Preferred proteins for this embodiment are G proteins, ATPases and HSPs. Chemical conjugation is carried out by conventional methods, e.g., use of preferred heterobifunctional crosslinkers. Alternatively, conjugates are produced genetically as fusion proteins by conventional methods. In yet another embodiment, the conjugates are created by permitting natural binding of the components to each other without chemical modification. Any of the foregoing conjugates or fusion proteins may be used when incorporated into vesicles or exosomes secreted from a cell. See Example 36 for methods and protocols.

[0368] SAg-encoding nucleic acid is fused in frame (or cotransfected) with nucleic acid encoding a signal transduction protein or HSP. Transfectants are prepared as in Example 1. They are used in vivo as a preventative or therapeutic antitumor vaccine according to Examples 15, 16, 18-23. They are also used ex vivo for inducing tumor specific effector cells for adoptive immunotherapy of cancer (Examples 2-5, 7, 15, 16 18-23). The peptide or polypeptide conjugates are also useful for the same purposes.

[0369] 37. SAgs with Specialized Sites for C-terminal GPI Anchoring, Glycosylation Sulfation, N-Myristoylation, Phosphorylation, Hydroxylation, N-Methylation, Signal Peptide Binding, LPS Binding, HSP Binding, Chemokine Binding and Prenylation

[0370] SAg-encoding nucleic acid is fused in frame to nucleic acids encoding the above “specialized sites” and transfected into tumor cells or accessory cells The structures of these sites is given in Table 3, p. 48 of Rocker R B I et al., J. Nutrition 123: 977-990 (1993).

[0371] Tumor or accessory cells express SAgs in a variety of fashions after post-translational modification (Wilkins, M R. et al., Proteome Research: New Frontiers in Functional Genomics Springer, Berlin, Germany (1997)). For example, myristoylated SAg will bind to surface lipids and will be minimally secreted. In glycosylated form, the SAg will be routed to the class II pathway and appear bound on the cell surface. When bound to invariant chain, the SAg will be routed to the class II receptor.

[0372] Nucleic acids encoding proteins that active in post-translational modification of SAgs are fused in frame to nucleic acid encoding SAgs. These posttranslational modifiable sites include, but are not limited to, a C-terminal GPI anchor, glycosylation site, palmitoylation site, myristoylation or prenylation site, N-methylation site, hydroxylation site, phosphorylation site, sulfation site, signal peptidase site, carboxylation site and prenylation sites.

[0373] The incorporation of many membrane proteins into the lipid environment is based on sequences of largely hydrophobic amino acids that can form membrane spanning domains. However, a large number of membrane associated proteins do not display hydrophobic elements in their primary sequences. The capacity for membrane association in these cases is often provided by covalent attachment (either cotranslationally or post translationally) of lipid groups to the polypeptide chain. Acylation of proteins by addition of C14 myristic acid to an N-terminal gly residue or addition of C16 palmitic acid by thioester linkage to cysteine residues is in a variety of positions in SAgs. Palmitoylation of SAgs is not restricted to thioester linkage and may occur through oxyester linkages to serine and threonine residues. Furthermore, thioester linkage of fatty acyl groups to proteins is not restricted to palmitate. Longer chain fatty acids such as stearic acid (C18) and arachidonic acid (C20) are also produced. The addition of palmitoyl and/or myristoyl groups with varying lengths confers additional and sufficient binding energy for hydrophobic binding of proteins to receptors, membranes or lipid bilayers. The attachment of palmitate is sufficient whereas the attachment of myristate is insufficient in isolation. Palmitoylation thus provides a means for membrane anchorage of SAgs and can allow effective concentration of an enzyme or other regulatory proteins at the membrane.

[0374] Glycosylated SAg is better capable of binding to oligosaccharide receptors on blood vessels, inflammatory cells or immunocytes. Signal peptide sequences permit the SAg to be routed to various cell surface receptors. Prenylation is important in the membrane attachment and protein-protein interactions of SAgs and oncogene activation. Prenylation, or post translational enzymatic addition of prenyl, geranyl, farnesyl or geranylgeranyl, involves reactions of a prenyl diphosphate with a cysteinyl sulfhydryl group near the C terminus of the protein to give a prenyl-S-Cys moiety. Characteristically the Cys-ali-ali-Xaa sequence (“ali” is an aliphatic amino acid; Xaa is any amino acid) is recognized by the transferase that catalyzes the reaction. When Xaa is serine, alanine or methionine, the protein is farnesylated; when Xaa is leucine, it is geranylgeranylated. Farnesylation of the protooncogene p21^{ras} is integral both for its membrane association and transforming activity. Farnesylated proteins mediate the induction by IL-1b of NOS whereas a geranylgeranylated proteins repress this induction.

[0375] Nucleic acids encoding HSPs, along with their promoters, are fused in-frame (or cotransfected) with SAg nucleic acid. These include but are not limited to two recently discovered HSP genes, orf37 and orf35 in Staphylococcus aureus that are upstream and downstream of grpE (hsp20), dnaK (hsp70) and dnaJ (hsp40) in the following sequence: orf37-hsp20-hsp70-hsp40-orf35. The promoters are located upstream of orf37 and upstream of hsp40. These fused proteins are useful as preventative or therapeutic antitumor vaccines according to Examples 15, 16, 18-23. They are also useful ex vivo for producing a population of anti-tumor T cells, NKT cells or NK cells for adoptive immunotherapy of cancer (Examples 2-5, 7, 15, 16, 18-23).

[0376] Most eukaryotic cells are decorated with chemical groups such as phosphates, methyls, sugars, or lipids during or after their translation from mRNA. These extra groups have various functions, often serving as switches or localization signals. One lipid modification is protein prenylation in which a 15-carbon farnesyl or 20-carbon geranylgeranyl group is attached to the protein's —COOH terminus followed by other modifications (proteolysis, methylation, and palmitoylation).

[0377] Most prenylated proteins are members of signal transduction cascades. For example, the -subunits of heterotrimeric guanosine triphosphate (GTP)-binding proteins (G proteins) and virtually all members of the Ras superfamily of proteins. Farnesylation of H, K, N-Ras is essential for the ability of oncogenic mutants of these proteins to transform cells. 30% of established tumor cell lines contain mutationally activated Ras proteins. FTase inhibitors shrink tumors in animals to an undetectable size with no significant toxicity after weeks or months of exposure. Farnesylation is a prerequisite for palmitoylation. Palmitoylation of H-Ras occurs only in the plasma membrane by a putative membrane-bound palmitoyl transferase. Farnesylation may bring a finite amount of H-Ras to all cell membranes, at which point and palmitoylation is required to trap it in the plasma membrane. H-Ras palmitoylation like G protein-subunit palmitoylation, is reversible and may regulate signal transduction. COOH terminal proteolysis of prenylated proteins and methylation are required for palmitoylation, membrane binding and Ras function. Prenyl protein specific protease and methyltransferase like Ftase may be good targets for drugs that prevent oncogenesis.

[0378] Common N terminal additions are fatty acid acylations and glycosylations which provide polypeptide chains with short “lipophilic handles” or recognition sites that serve to facilitate their vectoral transport or compartmentalization are common N-terminal additions. For example, myristic acid in the form of myristyl CoA serves as a substrate for specific N-terminal acylations that are important in anchoring proteins to endoplasmic membranes. The most common C-terminal modifications are amidations, acylations, polyadenylations and the enzymatic additions of tyrosyl residues. Similarly the C-terminal acylation process is complex. Prenylation occurs at Cys residues is often associated with proteins that end in (SEQ ID NO:163) Cys-Val-Ile-Ala. The reaction sequence involves (1) a first prenylation (addition of a farnesyl moiety to Cys) followed by (2) cleavage of the Ala, Ile and Val residues and (3) the carboxymethylation of the resulting C-terminal prenylated cysteine. In addition to providing a membrane anchor, this modification often is essential to function of oncogenes such as Ras.

[0379] Two separate and well characterized pathways for carbohydrate addition: the N-linked dolichol pyrophosphate mediated pathways and the O-linked pathways that utilize UDP sugars as substrates and hydroxylated amino acid side chains as sites for attachments. Side chains amino phosphorylation of specified proteins usually at tyrosyl or serinyl residues as a way of causing cascade-like amplifications in a metabolic system. Methylation and methyl additions can also serve as novel on-off switches for metabolic processes. The targeted amino acids or methyl additions are lysine, histidine and arginine. In prokaryotes, reversible methylations of aspartyl and glutamyl side chains can occur. The best example is carboxymethylation of glutamate which is associated with bacterial chemotaxis and is elaborated by the opening and closing of membrane ion channels upon methylation and demethylation. Post translational modifications can lead to crosslinking and stabilization of protein matrices. Amino acids such as L-lysine, L-glutamine, L-cysteine and L-tyrosine are utilized extensively as sources for protein cross-linking. Examples include the extracellular matrix cross linking of collagen and elastin and the stabilization of keratin-derived matrices and tubulin by -glutamyl lysine crosslinks.

[0380] In bacteria the majority of proteins that form durable wall associations possess either distinctive N-terminal signals (lipoproteins) or more commonly distinctive C terminal wall associating signals although a number of wall associated proteins possess neither of these types of signals. A number of wall-associated proteins in gram-positive bacteria are anchored to the external surface of the cytoplasmic membrane via a covalently attached lipid moiety. Both gram-negative and gram-positive lipoproteins possess similar distinctive N-terminal signal sequences which contain a tetrapeptide consensus at the cleavage site consisting of Leu-X-Y-Cys where X and Y are predominantly small neutral residues and signal and signal peptidase cleavage occurs between Y and Cys. This sequence directs either co- or post translational modifications involving transfer of glycerol from phosphatidylglycerol to the +1 Cys, followed by the transfer of fatty acids from phospholipid to the glyceryl-prelipoprotein to produce a diglyceride-prelipoprotein. The C terminal end of a large number of Gram positive wall-associated proteins share common structural features that are required to localize these proteins in the cells wall. These C-terminal structures include a number of distinct features. At the extreme C-terminus there is a stretch of 15-22 hydrophobic residues, followed by a short tail of predominantly charged amino acids. Immediately upstream from this hydrophobic/charged-tail domain, there is a highly conserved (SEQ ID NO:164) Leu-Pro-X-Thr-Gly-X (LPXTGX) motif which is usually preceded by a sequence containing a high proportion of regularly spaced prolines. GPI anchors have not been identified on bacterial cell surface proteins. But the strong conservation of the (SEQ ID NO:164) LPXTGX motifs and of a hydrophobic/charged tail residue-helical domain are common structural features that are required to localize these proteins in the cell.

[0381] Protein A is covalently coupled to the cell wall whereas of the proteins are not. Non-covalent interactions may occur in some proteins holding it in the cell wall while cross-linking occurs around proline rich region to form peptidoglycans. Hydrogen or water binding sites can be created by hydroxylation reactions, e.g., hydroxylation of proline in collagen provides sites for intrachain hydrogen and H2O bonding.

[0382] SAg-encoding nucleic acid is transfected into cells together with coding regions to permit the above post translational modifications which contribute to the production of an immunogenic tumor cell, accessory cell (preferably a DC) or a tumor cell/accessory cell hybrid. Such nucleic acids encoding the sites for post-translational modifications of SAgs are useful in the structural modification, translocation, cell surface binding and association with key energy-producing and signal transduction molecules and receptors. The cells expressing the products of these post-translational modifications are useful as a preventative or therapeutic antitumor vaccine according to Examples 15, 16, 18-23). They are also useful ex vivo for producing a population of anti-tumor T cells, NKT cells or NK cell for adoptive immunotherapy of cancer (Examples 2-5, 7, 15, 16, 18-23).

[0383] 38. SAgs and SAg Proteomes for Enhanced Immunogenicity Specificity and Intracellular Trafficking of Soluble or Cell-bound Binary or Ternary Complexes

[0384] SAgs with genetically engineered binding sites are provided in order to enhance their coupling to bioreactive complexes, peptides and LPS's and galactosylceramides. SAgs with a glycosylation other glycosylceramide binding site bind to glycosylceramide-CD1 or glycosylceramide-CD1 complexes alone in soluble or immobilized form, or cell bound after binding to a receptor on a T cell or NKT cell. SAgs are also provided with an LPS binding site for binding to soluble, immobilized or cell bound LPS-CD14 complexes.

[0385] SAgs are provided with a glycosphingolipid or glycosylceramide site by which they can bind to CD1-glycosylceramide or CD1-glycopsphingolipid complexes present in soluble, immobilized form or affixed to CD1+ cells or NKT cells. Glycosylated SAgs are bound to CD1-glycosylceramide complexes in soluble form or fixed to CD1+ cells or NKT cells.

[0386] SAgs are also provided with an overexpressed site for MHC class I molecules, to increase the effectiveness of binding to MHC class I-tumor peptide antigen complexes or TCR-bound MHC class I tumor peptide complexes.

[0387] SAgs are engineered with repeating peptides which bind to the Vb chain to increase clustering. SAgs with an “overexpressed” (in terms of number) SAg receptor site binds to tumor cells expressing SAg receptors. SAgs possess a site for binding HSPs which are useful in immunizing normal or anergic T cells in a tumor patient. SAgs bind to T cell antagonist MHC-tumor peptide complexes converting the binary complex to a ternary complex with T cell agonist activity. Anergic T cells are activated by these ternary complexes.

[0388] SAgs are prepared with an overexpressed site for binding glycosphingolipids or glycosylceramides. These complexes are loaded onto CD1 receptors of antigen presenting cells and presented to the tumor bearing host either in vivo or ex vivo (Examples 4, 5, 7). SAgs with a myristoylation site will bind to bacterial glycolipids such as lipoarabinan or a mycolic acids The binary complex is then loaded onto APCs expressing CD1 receptors. These cells are then used in vivo (Example 14, 15, 16, 18-23) to produce a tumoricidal response. Alternatively, they are used ex vivo to produce tumor specific effector T or NKT cells for adoptive immunotherapy (Examples 2, 7, 14, 15, 16, 18-23).

[0389] A SAgs may also be prepared with signal sequences for protein sorting and intracellular trafficking. Signal sequences comprise short stretches of amino acids located at the N terminus of a protein, the C terminus or in the middle of the peptide chain. The physical properties of these sequences e.g., their polarity or charge. Signal regions are three dimensional domains on the surface of a protein made up of different fragments of the same peptide chain or by different chains altogether. Structural signals are recognized and bound by receptors located on the membranes of organelles. Signal sequences also serve as recognition sites for enzymes which modify the proteins altering their properties and bring about a change in their fate. Once they have fulfilled their function, some of the signal sequences are removed by sequence specific hydrolases. Signal peptides fused to SAgs guide them to the secretory or exocytosis pathway, or to proteins localized to the endoplasmic reticulum, lysosomes, mitochondria, nucleus, peroxisomes or secretory vesicles.

[0390] Lipid Rafts Comprising SAg plus Signal Transduction Molecules

[0391] Lipid rafts are small glycosphingolipid- and cholesterol-rich plasma membrane microdomains on the cell surface to which proteins and lipids have variable affinities. They function as platforms for both signal transduction and membrane trafficking.

[0392] Sphingolipid-cholesterol rafts are insoluble in the detergent Triton X-100 at 4° C., in which they form glycolipid-enriched complexes (DIGs). Because of their high lipid content, these detergent-insoluble, glycolipid-enriched complexes (DIGs) float to a low density during gradient centrifugation, which enables any associated proteins to be identified and distinguishes DIGs from other detergent-insoluble complexes. Milder detergents such as octylglucoside will solubiize lipid rafts. Glycosphingolipids are insoluble by themselves, and sphingomyelin is resistant to detergent extraction in the presence of cholesterol.

[0393] A model for the organization of sphingolipid-cholesterol rafts is as follows: Sphingolipids associate laterally with one another, probably through weak interactions between the carbohydrate heads of the glycosphingolipids. The sphingolipid head groups occupy larger excluded areas in the plane of the exoplasmic leaflet than do their predominantly saturated lipid hydrocarbon chains. Any voids between associating sphingolipids are filled by cholesterol molecules which function as spacers. The close-packed sphingolipid-cholesterol clusters behave as assemblies within the exoplasmic leaflet, where the intervening fluid regions are occupied by unsaturated phosphatidyl-choline molecules. Glycosphingolipids usually carry a long fatty acid which is amide-bonded to the sphingosine base and can interdigitate with the cytoplasmic leaflet of the bilayer. As cholesterol is present in both leaflets, it functions as a spacer in the cytoplasmic leaflet as well, filling voids created by interdigitating fatty acid chains. Rafts contain proteins attached to the exoplasmic leaflet of the bilayer by their GPI anchors, proteins bind to the cytoplasmic leaflet by acyl tails (e.g., the Src-family kinase) or proteins associate through their transmembrane domains, Interactions with raft lipids may be mediated by binding to cholesterol and by acylation of C-terminal cysteines.

[0394] The most important property of the lipid microdomains is that specific proteins associate with them. Glycosylphosphatidylinositol (GPI)-anchored proteins and doubly acylated kinases bind to rafts by their lipid moieties. Also several transmembrane proteins have been recovered in DIGs. Several proteins have been identified as residents of these lipid microdomains, including caveolin, GPI-linked membrane proteins, influenza hemagglutinin, the high-affinity IgE receptor, and the B cell integral membrane protein CD20. In addition, several molecules involved in signal transduction have been shown to be associated with lipid rafts such as the Gα subunits of heterotrimeric G proteins, the double-acylated Src family protein tyrosine kinases Lck, Lyn, and Fyn, and the Zap70family protein tyrosine kinase, Syk. The lipid rafts are also associated with actin and actin-binding proteins.

[0395] The function of rafts in signal transduction is to select and concentrate molecules or receptors in a micro-environment of the membrane thus speeding up binding during signalling and preventing inappropriate crosstalk between pathways. They are also depots of cargo molecules and transport machinery for trafficking. Clustering of GPI anchors with rafts leads to interaction with signal-transducing proteins that then become activated. They facilitate interaction with ligands and effectors on both sides of the membrane to include kinases and their substrates for signal transduction. Two Src family kinases, Lck and Fyn, both implicated in T-cell activation, are immunoprecipitated with GPI-anchored proteins after Triton X-100 extraction. Indeed, rafts maintain a pool of the hyperphosphorylated (inactive) Src-like kinase Lck which interacts with rafts by its myristyl and palmitoyl anchor. Trimeric G proteins and Ras also associate with DIGs. Upon cross-linking the TCR, its associated signaling molecules and coreceptors acquire increased affinities toward lipid rafts. Integrity of these domains is required for efficient signal transduction by the TCR. Lipids involved in signal transduction have also been localized to DIGs which include phosphoinositides such as phosphatidyl-inositol-(4,5)-bisphosphate and sphingomyelin.

[0396] Superantigens alone or in combination with other molecules including but not limited to GPI, signal transduction molecules G proteins, ganglioside/glycolipid transfer agents (See glycolipid transfer factors-Section 58 and influenza virus hemeagglutinin, HA 2 or Sendai virus or the heptad repeat unit), and tumor associated antigens are coupled to lipid rafts by methods given in Example 4. The lipid rafts can also contain a α-1-4 digalactosylceramides which are natural receptors for SAgs. These derivatized lipid rafts are rapidly integrated into cell membranes and are used to activate inhibitory or apoptotic pathways, in tumor cells. They are useful in tranferring receptors to tumor cells or T cells which recognize natural ligands for the activation tumor cell apoptosis. They activate T cells and NKT cells by provision of superantigens, receptors and key signal transduction molecules, e.g., lyck or fyn involved in T cell activation. Delivery of tumor associated antigens via lipid rafts has the added advantage of stimulating T cells from tumor bearing patients which have been anergized in the course of tumor growth.

[0397] Lipid rafts are prepared as given in Example 61. They are useful in vivo as a preventative or therapeutic antitumor vaccine. They are administered parenterally in doses of0.01-1 ug in normal saline three times weekly either before or after tumor implantation. When given after implantation, the treatment is continued for four weeks (Examples 5, 15, 16, 18-23, 57-59). They are also useful ex vivo to immunize T or NKT cells to produce a population of effector T or NKT cells for adoptive immunotherapy of cancer. For ex vivo use the lipid rafts are incubated with T cells or antigen presenting cells in doses of 0.1-1 ug for 24 hours after which the cells are harvested and administered (Examples 2-5, 15, 16, 18-23, 57-59).

[0398] GPI-SAg-Ceramide or GPI-SAg-CD1-Ceramide Complexes Expressed on Tumor Cells Antigen Presenting Cells, Yeast Displays, Sec Yeast Mutants, APC/tc Hybrid and Shed as Exosomes

[0399] Cells expressing, overexpressing or shedding GPI proteins are prepared so that they comprise covalently- or noncovalently bound mono- or diglycosylceramides with terminal or subterminal α1-2, α1-4 or α1-6 configurations and SAg protein or peptide moieties.

[0400] The synthetic pathway involves transfection of SAg DNA into a tumor cell or accessory cell or a hybrid thereof. The SAg protein is translated in a precursor form consisting of a receptor-coding region sandwiched between amino and carboxy-terminal sequence signals. In the endoplasmic reticulum, the signal peptides are cleaved and a GPI anchor comprising a glycosylceramide optionally bonded to a phytosphingosine chain is attached at a specific site designated w. Further post-translational modifications are made in the Golgi before trafficking to the outer leaflet of the plasma membrane. Once GPI-SAg molecules arrives at the cell surface, they may remain entirely mobile within the lipid bilayer or may associate within membrane subdomains.

[0401] GPI-SAgs are released from the cell surface into the extracellular milieu. They leave the cell surface as SAg-glycan-lipid complexes, as SAg-glycan complexes or as free SAgs devoid of a GPI anchor. GPI-SAgs released from intact cell are also released free of their lipid moiety, hence their designation as LIP(−) GPI-SAgs, whereas those presumably released with an intact lipid moiety are termed LIP(+) GPI-SAgs. The lipid free moieties are more hydrophilic and therefore soluble in an aqueous environment, whereas the intact lipid-glycan-protein complexes travel in more hydrophobic environments. In the absence of detergents, the released or “shed” LIP(+)-GPI-SAgs in vivo are vesicles with clearly defined lipid bilayers or as hydrophobic aggregates lacking a bilayer morphology. These shed vesicles, often referred to as exosomes, contain many LIP(+) GPI-SAgs. The shedding process itself appears to depend on GPI-proteins, because vesiculation is reduced by 50-90% in cells lacking GPI proteins.

[0402] Shedding is enhanced by treating the tumor cells with 20 mM retinoic acid. In addition high concentrations of glycosphingolipids on the tumor cell surface are generated by selective transport from the site of synthesis to the cell surface. Provision of ceramide containing the α2-hydroxy fatty acid C6OH results in (1) conversion to galactosylceramide, galabiosylceramide and sulfatide and (2) sorting in the trans-Golgi network to the tumor cell surface. GPI-SAgs remain biologically active after being released from the outer leaflet of cell membranes. LIP(+) GPI proteins may also transit to adjacent membranes where they associate with the exogenous membranes by incorporating themselves into the lipid bilayer in addition to binding to surface receptors. Additionally, superantigen or oxyLDL receptor nucleic acids are transfected into yeast sec mutant. The yeast sec mutant,64, contains a temperature senstive mutation in a gene product required for the transport of secetory vesicles for the trans-Golgi network to the plasma membrane. Gene expression is initiated by an inducible promoter concomitant results in the arrest of vesicle fusion and the insertion of SAg or LDL receptor protein in the plasma membrane. Thus gene expression begins at the same time that secretory vesicles become unable to fuse with the plasma membrane, ensuring that the desired gene products accumulate in the membranes of these vesicles. The purification of these vesicles is rapid and simple, thereby facilitating the subsequent characterization of the desired gene product. Because the Sec6 protein is known to be involved only in the fusion of these vesicles with the plasma membrane, translocation and processing of proteins in the endoplasmic reticulum and processing in the Golgi are largely unaffected by the Sec6 mutation.

[0403] The transfected superantigen or LDL nucleic acid (plasmid) is expressed as superantigen polypeptide or oxyLDL receptor polypeptide in vesicles in association with yeast GPI-lipid membrane structures. The lipid portion of the SAg-GPI-lipid complex comprises a ceramide with a C26 dihydroxy sphingosine or phytosphingosine configuration which is essential for activating NKT cells. The resulting SAg-GPI-phytosphingosine vesicles have the capacity to activate T cells via the superantigen and NKT cells via the phytosphingosine and thus produce a potent anti-tumor effect. Administered preferably by direct administration into the tumor, the oxyLDL receptors induce an excessive accumuation of endogenous or exogenously administered oxyLDL and LDL at the tumor site. The deposited oxyLDL induces apoptosis and foam cell formation in tumor cells and tumor microvascular endothelial cells resulting in potent tumoricidal response. Optionally, SAg-GPI-phytosphingosine are expressed on these vesicles together with vesicles expressing oxyLDL receptor-GPI-phytosphingosine or oxy LDL receptors. Tumor associated peptides and polypeptides, tumor apoptosis inducing peptides and polypeptides including but not limited to thrombospondin, angiogenesis inhibitor peptides and polypeptides including but not limited to angiostatin or VEGF are also useful fused or conjugated to SAgs in the same sec mutant or coadministered with the SAg-sec mutant in a separate sec mutant. Vesicles containing all of the above constructs including but not limited to SAg-GPI-phytosphingosine or oxyLDL receptor-GPI-phytosphingosine are prepared and isolated according the method of Coury L A et al., Methods in Enzymology 306: 169-186 (1999) and as in Examples 4, 5, 7, 42, 50-51.

[0404] All of the constructs given above are administered preferentially by direct intratumoral injection as given in Example 20. They are useful in vivo as a preventative or therapeutic antitumor vaccine according to Examples 2, 7 14-16, 18-23, 36. They are also useful ex vivo to produce a population of T or NKT cells for adoptive immunotherapy of cancer (Examples 2-5, 7, 15, 16, 18-23).

[0405] A yeast cell display system is also used to present SAg to T cells, NKT cells or NK cells in the context of phytosphingosine groups present in the yeast cell membrane. The yeast displays are prepared by the method of (Cho B K et al., J. Immunologic Methods, 220: 179-188 (1998) and used to acitvate T cells, NK cells and NKT cells. The yeast presentation has the advantage of presenting as many as 10⁵ proteins per cell at the yeast surface potentially allowing multivalent interactions to occur between the yeast and target cell. The superantigen gene is transfected into the S. cervevisiae. Individual colonies of the transfected yeast are grown overnight in the Trp-media and harvested in the log phase. Murine splenocytes (10⁵ ) are incubated with varying number of yeast cells that bear the superantigen. After 20 h in culture, cells are harvested, washed in PBS and screened for activation markers. In this yeast display system constructs including but not limited to SAg-phytosphingosine or SAg-GPI-phytosphingosine, SAg-lipid or lipoprotein conjugates are presented to T cells and NKT cells to produce a population of T cells, NKT cells or NK cells useful for the adoptive therapy of cancer under protocols given in Example 2, 7, 14, 15, 16, 18-23. They are also useful as a vaccine or against established tumor as given in Examples 14, 15, 16, 18-23.

[0406] 39. Effector T Cells: Methods of Lowering Activation Threshold for Activation by SAg

[0407] Tumor peptide MHC complexes are insufficient to activate T or NKT and may even induce antagonism or anergy. SAgs added to the complexes are useful to overcome activating T or NKT cells and overcoming the anergy common in tumor-bearing hosts. To enhance responsiveness to tumor-peptide-MHC-SAg complexes and to overcome anergy, it is desirable to reduce the threshold for signal transduction in an effector T or NKT cell population. To accomplish this, nucleic acids encoding SAg-specific TCR Vb regions are transfected into T or NKT cells to duplicate or otherwise induce overexpression. In addition, measures are taken to alter signal transduction by dimelizing the tyrosine kinase receptors or deleting the inhibitory region of the TCR.

[0408] Most SAgs show selective binding to well defined segments of the Vβ chain of the TCR. The TCR genes are clustered on chromosome 7 and include 75-100 V, 2D, 13 J, and 2 Cβ genes. The entire 685-kb human locus has been sequenced, the longest contiguous subfamilies that exhibit >75% sequence identity at the DNA level. The human TCR locus is on chromosome 14 and consists of 42 V genes, 61 J genes and 1 Cβ gene. The TCR β chain genes are on chromosome 6 and consist of approximately 23V, 2D, 12J, and 2C gene segments. The 2 Cβ genes form clusters with upstream Dβ and Jβ segments: Cβ1 rearranges only with Dβ1/Jβ1 genes whereas Cbβ2 rearranges with both Dβ and Jβ segments. Similarly, functional Vβ genes appear to rearrange to both J clusters in a random fashion. The b chain transcripts of antigen-specific T cell clones appear to contain little length variation and harbor conserved N additions.

[0409] A mechanism for achieving diversity in variable (antigen-specific) regions of the TCR involves the random addition of nucleotides inserted at junctional positions during the joining of VβDβJ segments. It is at this position that nucleic acids encoding the major Vb binding site for a specific SAgs are inserted. This overexpression allows for more selective recognition of SAg and a lower activation threshold by a SAg that selectively binds at that site.

[0410] Nucleic acid encoding SAg receptor is amplified and transfected into T cells to overexpress the SAg receptor on the cell surface These T cells bind SAgs, and this is linked to appropriate signal transduction pathways that deliver a mitogenic signal to the T cell. One method of increasing T or NKT cell reactivity to a SAg is to increase the density of their SAg receptors. Even in the absence of ligand, the equilibrium is shifted from monomeric inactive receptors to dimeric or oligomeric active receptors. Concomitant expression of the corresponding ligand reinforces the signal. Increased numbers of receptors occur after increased transcriptional activation of, or amplification of, the SAg receptor gene. Amplification is the preferred method.

[0411] The SAg receptor may also be mutated so that it engages in ligand-independent dimerization. Examples of such mutations are addition or loss of a cysteine residue in the extracellular domain causing formation of dimeric and disulfide bonded and activated receptors. In addition it is possible to dimerize tyrosine kinases by fusing a tyrosine kinase catalytic domain to a protein which is a functional dimer. These fusion partners are able to form homodimers. Such a fusion protein results in dimerization of kinase domains which allows their autophosphorylation and activation. Interaction with receptors in a manner which promotes dimerization of two different receptors is another method to enhance receptor reactivity. The kinase domain of a receptor may be mutated to increase catalytic activity or alter substrate specificity. Such mutations expand quantitatively and qualitatively the repertoires of substrates in the target cells and thereby shift the balance towards activation and transformation. Mutations in regions involved in negative regulation of receptor function also contribute to the transforming properties. Loss of regions in the C terminus that are regulatory serine phosphorylation or autophosphorylation sites also contributes to excessive receptor activity.

[0412] Effector cells as discussed above are prepared as in Examples 4, 5, 7. They may also be used in vivo as tumor specific effector (T or NKT) cells for the adoptive immunotherapy of cancer (Examples 2-5, 7, 15, 16, 18-23).

[0413] 40. SAg Nucleic Acids Fused of Cotransfected into Tumor Cell with Nucleic Acids Encoding Inducible Nitric Oxide Synthase (iNOS)

[0414] SAg-encoding nucleic acid is fused in frame (or cotransfected) with nucleic acid encoding inducible nitric oxide synthase which produces nitric oxide (NO). NO is derived from terminal guanido-nitrogen of L-arginine which is catalyzed by the constitutive or inducible nitric oxide synthase (iNOS). NO is pleiotropic and is a major cytotoxic mediator secreted by activated endothelial cells and macrophages. Production of NO is associated with apoptosis of tumorigenic cells and with a bystander effect on surrounding non-NO producing tumor cells (bystander effect). Non metastatic tumor cells show high levels of iNOS activity and NO, whereas metastatic cells do not. There is an inverse relation between production of endogenous NO and the tumor cells survivability. In the present invention, tumor cells transfected with SAg-encoding nucleic acid are cotransfected with nucleic acids encoding iNOS. The gene for iNOS has been cloned and characterized by Xie Q et al., Science 256: 225-228 (1992). Tumor cells cotransfected with nucleic acids encoding SAgs and iNOS demonstrate augmented immunogenicity via the expression of SAg as well as enhanced auto- and bystander tumoricidal capacity via NO production.

[0415] After administration to a patient and colonization of metastatic sites, the transfectants induce a powerful local and systemic tumoricidal effect. The presence of NO allows the transfectants to die naturally via auto-apoptosis within a finite period (usually 72 hours) after administration thus minimizing the risk of inducing active metastatic disease. These tumor cell transfectants may also be made to express oncogenes associated with the metastatic phenotype to promote localization of the cells to tumor sites in vivo. The cells may be further transformed by nucleic acid encoding angiostatin or other angiogenesis inhibitors for additional tumoricidal potency. The transfectant are prepared by methods in Example 1-3 and used as a preventative or therapeutic antitumor vaccine by methods in Example 15, 16, 18-23).

[0416] 41. DCs, Other Accessory Cells and DC/tc Hybrids Expressing and/or Secreting SAg

[0417] Accessory' cells are necessary to generate primary antibody responses in culture. Of the various types of accessory cells, DCs are the most effective APC. DCs are a preferred accessory cell. However, the invention is not confined to DCs. Any other accessory cell type may be used in place of DCs. In particular, accessory cells are defined in Oxford's Dictionary of Biochemistry and Molecular Biology as including fibroblasts, synoviocytes, macrophages, B cells, Langerhans cells and any other cell type which assists in producing an immune response of any kind.

[0418] DCs have exceptional capability to capture antigens, process and present antigenic peptides, migrate to lymphoid organs, and induce primary immune responses of both CD8+ and CD4+ T cells. The ability of DCs to act as potent APC in the induction of T cell responses is attributed to the high expression of MHC molecules and adhesion and/or costimulatory molecules as well as the cells' capacity for to producing cytokines essential for the activation and proliferation of the T cells.

[0419] The number of molecules of antigen-MHC complex on tumor (and infected) cells is typically small ( 100 per cell), and are recognized by rare T-cell clones (at a frequency 1/100,000) via a TCR that has a low affinity (1 M). In vitro or in vivo, only a few DCs are necessary to provoke a strong T-cell response. In the mixed leukocyte reaction, one DC was sufficient to stimulate 100-3,000 T cells. MHC products and MHC-peptide complexes are 10-100 times higher on DCs than on other APCs such as B cells and monocytes. Mature DCs resist the suppressive effect of IL-10, but synthesize high levels of IL-12 that enhances both innate (NK cell) and acquired (B and T cell) immunity. DCs also express many accessory molecules that interact with various molecules or receptors on T cells to enhance adhesion and signalling (co-stimulation): examples of such pairs are LFA-3/CD58, ICAM-1/CD54, B7-2/CD86. Tumor cells that express the B7 gene elicit CTLs against otherwise silent, subdominant tumor antigens. All these properties of DCs (MHC expression, CD1 expression, secretion of IL-12 and the expression of co-stimulatory molecules) are upregulated within a day of exposure to many stresses and “dangers” including microbial products.

[0420] Infected cells and tumors frequently lack the costimulatory molecules that drive clonal expansion of T cells, the production of cytokines, and T cell development into killer cells. Located in most tissues, DCs overcome challenges by capturing and processing antigens, and displaying large amounts of MHC-peptide complexes on their surface. They upregulate their co-stimulatory molecules and migrate to lymphoid organs, the spleen and draining lymph nodes, where they activate antigen-specific T cells. All of these activities of DCs can be induced by infectious agents and inflammatory products, so that DCs appear to function as “mobile sentinels” that not only bring antigens to T cells but also stimulate those T cells in the induction of immunity.

[0421] DCs are present in most tissues in a so-called “immature” state, unable to stimulate T cells. Although these DCs lack the requisite accessory signals for T-cell activation, such as CD40, CD54 and CD86, they are well equipped to capture antigens, a key event in the induction of immunity; the antigen is then able to induce full maturation and mobilization of the DCs. Terminally-differentiated or mature DCs can readily prime T cells. Once activated by DCs, these T cells can complete the immune response by interacting with B cells for antibody formation, macrophages for cytokine release, and target cells resulting in lysis. Thus, immature DCs first handle antigens and then, as mature DCs a day or more later, they potently stimulate T cells.

[0422] DCs stimulate CTLs, which express the accessory molecule CD8 and interact with MHC class I bearing cells, to proliferate vigorously. In the presence of mature DCs and of IL-12, CD4-expressing T-helper cells turn into interferon gamma (IFN)-producing TH-1 cells. IFN activates the antimicrobial activities of macrophages and, together with IL-12, promotes the differentiation of T cells into killer cells (CTL). The capacity of DCs to produce IL-12 and stimulate TH-1 cells leads to microbial resistance. Through IL-4, DCs induce T cells to differentiate into TH-2 cells which secrete IL-5 and IL-4, activate eosinophils and help B cells generate an antibody response, respectively. DCs respond to T cells as well. CD40 and the newly described TRANCE/RANK receptor on DCs are ligated by the TNF (tumor-necrosis factor) family of proteins expressed on activated and memory T cells; this leads to increased DC survival and, in the case of CD40, upregulation of CD80 and CD86, secretion of IL-2 and release of chemokines such as IL-8 and MIP-1a and b.

[0423] Immature DCs capture antigen (and particles and microbes in general) by phagocytosis. They then form large pinocytic vesicles in which extracellular fluid and solutes are sampled, a process called macropinocytosis. Finally, they express receptors that mediate adsorptive endocytosis, including C-type lectin receptors like the macrophage mannose receptor and DEC-205, as well as Fc, located in most tissues, and Fc receptors. Macropinocytosis and receptor-mediated antigen uptake make antigen presentation so efficient that picomolar and nanomolar concentrations of antigen suffice, much less than the micromolar levels typically employed by other APCs. However, once the DC has captured an antigen, which also provides signals to mature, its ability to capture antigens rapidly declines, and the cell begins to assemble antigen-MHC class II complexes.

[0424] An antigen enters the endocytic pathway of the DC. DCs produce large amounts of MHC class II-peptide complexes due to specialized, MHC class II-rich compartments (MHCs) that abound in immature DCs. MHCs are late-endosomal structures that contain the HLA-DM or H-2M products, which enhance and perform editing functions in the binding of peptide to MHC class II. During maturation of DCs, MHCs convert to non-lysosomal vesicles that discharge their MHC peptide complexes to the surface.

[0425] To generate cytotoxic killer cells, able to eliminate infected cells, and attack tumor cells and transplanted foreign cells, DCs must present peptides (complexed generally to MHC class I proteins) to CD8+T cells. Display of peptide-loaded MHC class I complexes on the DC surface follows translocation by a peptide transporter from the cytosol to the ER, where complexing occurs and then to the surface.

[0426] Human DCs are characterized by a pattern of surface markers and have the phenotype CD1a+, CD3^{neg}, CD4^{neg}, CD8^{neg} CD20^{neg}, CD40+CD86+ in the human. The murine phenotype is and CD3^{neg} CD4^{neg}, CD28^{neg}, CD8-B220^{neg}, CD40+, CD80+ and CD36+.

[0427] Maturation of DCs is required for the initiation of an immune response. Microbial products including whole bacteria and the bacterial cell-wall component LPS and inflammatory mediators such as IL-1, GM-CSF and TNF, stimulate DC maturation, whereas IL10 blocks it. Ceramide, which is induced by maturation signals, shuts down antigen uptake by the DC. Mature DCs express high levels of the NFkB family of transcriptional control proteins (RelA/p65, RelB, RelC, p50, p52) which regulate the expression of many gene encoding immune and inflammatory proteins. Signalling through the TNF-receptor family, for example TNF-R (CD-120a/b), CD40, and TRANCE/RANK, results in activation of NFkB. Therefore, to induce an immune response through activation of DCs, a pathogen or antigen may have to mobilize the signal transduction pathways of the TNF-R family and TNF-R-associated factors (TRAFs). One explanation for the failure of the immune system to eradicate most immunogenic tumors is the lack of tumor antigen presentation by DCs in vivo.

[0428] Several strategies using tumor antigen-charged DCs as vaccines for cancer immunotherapy have been developed. Immunization with DCs pulsed with purified tumor-associated peptides or proteins has been shown to be a powerful method of priming tumor-reactive T cells and inducing host protective and therapeutic antitumor immunity in mice and man. However, such a clinical approach is currently limited due to the paucity of identified human tumor rejection antigens. The polymorphism of the HLA system has also made it difficult to identify tumor-associated peptides as cancer vaccines. In human melanoma, a class of tumor-associated proteins has been identified. However, it is unclear which antigen is the best choice for effective tumor rejection in vivo or how effective any such antigen may be. Thus, immunization with defined tumor antigens is currently limited to a small number of cancers in which candidate antigens have been identified. Anichini et al., J Immunol. 156:208-217 (1996), showed that the majority of CTL present in HLA-A2.1+ melanoma patients were not directed to the known tumor antigens, Melan-A/Mart-1, tyrosinase, gp100 or MAGE-3. Therefore, immunization with other, yet unidentified, antigens would be more effective in eliciting tumor immunity in these patients. Johnston et al., J. Exp. Med. 183:791-800 (1996) demonstrated that the enhanced immunogenicity of tumor cells engineered to express the B7-1 gene was a result of expansion of the antigenic repertoire of the tumor. This implies that vaccination with multiple tumor antigens may be superior to use of a single dominant epitope. Indeed, in situations where a tumor-associated antigen remains unidentified, a novel approach is needed for presentation of that antigen by a professional APC.

[0429] An alternative approach, not encumbered by these limitations, is to use unfractionated tumor peptides or tumor proteins as a source of tumor antigens. Two studies have shown that administration to mice of APC (from the spleen) or epidermal Langerhans cells pulsed with tumor fragments resulted in protective immunity against tumor challenge. Zitvogel et al., J. Exp. Med. 183:87-97 (1996) showed that vaccination of mice with bone marrow-derived DC pulsed with unfractionated tumor peptides reduced the growth of subcutaneously established, weakly immunogenic tumors. Thus, immunization with multiple tumor antigens may be superior to use of a single dominant epitope.

[0430] One approach to overcome the possible drawbacks of unfractionated tumor antigens is to use mRNA from tumor cells as a “source” of antigen. mRNA can be amplified from a very small number of cells, permitting the generation of sufficient amounts of antigen from minute amounts of tumor tissue Moreover, tumor-specific mRNA can be enriched by subtractive hybridization to remove RNA that is common to normal tissue. This increases the levels of the relevant tumor-specific antigen(s) that can be achieved, and hence, the potency of the vaccine. More importantly, this approach reduces the concentration of nonspecific antigens or, possibly, self-antigens, thereby lessening the potential for autoimmunity. Pulsing DCs with RNA is known to be effective in empowering them to induce CTL responses and tumor immunity.

[0431] The fusion of tumor cells with DCs is another approach to generate a hybrid vaccine that has both potent antigen processing/presenting power along with the endogenous expression of multiple tumor antigens. Such a hybrid cell would be more effective in inducing antitumor immunity. Gong et al., Proc. Natl. Acad. Sci USA 26:6279-6283 (1998), demonstrated that fusion of a relatively immunogenic mouse tumor, MC38 carcinoma, with syngeneic DCs resulted in a vaccine that induced (1) T cell protective immunity against tumor challenge and (2) rejection of an established tumor. Wang et al., J. Immunol. 161:5516-5524 (1998) used the poorly immunogenic B16 (B16, F10) melanoma which does not express MHC and costimulatory molecules. Immunization with irradiated B16 tumor cells failed to induce systemic immunity or elicit functional tumor-reactive T cells. RMA-S is a Rauscher MuLV-induced T cell lymphoma originating in a C57BL/6 (“B6”) mouse that is genetically defective in TAP, and thus, does not process endogenous antigens for binding to MHC. Fusion of DCs with syngeneic tumor cells generated hybrid cells that expressed both DC-associated accessory molecules important for antigen presentation and tumor-derived antigens. The DC/tc hybrids were processed and presented tumor-associated antigens and elicited tumor-reactive CTLs. Vaccination of B6 mice with B16/DC hybrid cells induced partial protective immunity against tumor challenge. Immunization with B16/DC or RMA-S/DC hybrid cell vaccines primed lymph node (LN) T cells, which, after expansion ex vivo, were active in adoptive immunotherapy. The transfer of such vaccine-primed, expanded T cells into tumor-bearing mice reduced the number of established B16 pulmonary metastases and, in the case of RMA-S/DC, effectively eradicated disseminated FBL-3 tumor.

[0432] The present invention includes a hybrid cell made from fusion of a tumor cell and a DC cell further transformed or transfected with a SAg. Nucleic acids encoding SAgs may be introduced into either the tumor cells or the DCs prior to fusion as in Example 1, 2, 3, 25, 26. This fused cells are prepared as in Example 24, 25 and their phenotype established by the retention of DC characteristics, tumor cell antigens and the expression of SAg (Example 25). By virtue of these multiple features, this SAg-expressing DC/tc has the unique capacity activate maximally an anti-tumor immune response.

[0433] SAg stimulation is known to activate CD4+ and CD8+ T cells to recognize and lyse tumors specifically both in vitro and in vivo. The DC component of the hybrid cell provides optimal tumor antigen presentation due to its enormous surface area together with natural expression of costimulatory molecules B7.1, B7.2, adhesion molecules ICAM-1 and ICAM-3, MHC class I and class II and CD1 receptors. B7.1, in particular, provides a basis for expanding the epitope recognition spectrum from dominant to subdominant epitopes. The expressed SAg confers upon the hybrid cell an augmented capacity to activate various classes of cells that mediate both innate and “acquired” or adaptive immunity, including CD4+ and CD8+ T cells, NK cells and NKT. The SAg also contributes to generation of TH-1 cytokines by this class of T helper cells which contributes to an optimal anti-tumor response. The DC/tc hybrid that expresses and/or secretes SAg is abbreviated herein as an “S/D/t” cell and combines the potent activating properties of SAg with the specialized (tumor) antigen presenting capacity of the DC and the tumor antigens provided endogenously by the tumor cell partner. This S/D/t cell thus consolidates in a single cell the capacity to unleash and amplify the full weight of the host immune response specifically against a selected array of tumor associated antigens.

[0434] The present invention also includes the additional introduction, into the S/D/t cell of with additional nucleic acids. In one embodiment, the additional nucleic acid encodes the particular galactosyltransferase enzyme that catalyze the synthesis of the “heterograft epitope” Gal. In another embodiment, the additional nucleic acid encodes enzymes that synthesize galactosylceramide which is the “natural” epitope recognized by the invariant chain of NKT cells.

[0435] To summarize the foregoing section, the present invention includes DCs, other accessory cells or hybrid DC/tc, each transformed to express SAgs as described in Examples 1 and 3. The transformed (or transfected) hybrid cell, the S/D/t cell, expresses (1) the major accessory molecules of DCs cells (such as CD40, CD80 and CD86, MHC class I and II and CD1); (2) tumor associated epitopes provided by the tumor cell fusion partner; and (3) SAg either membrane bound, secreted or both which activates T cells, NK cells and NKT cells to produce a specific or selective tumoricidal response.

[0436] While the tumor S/D/t cells are preferred, SAg-transfected DCs or other accessory cells are also effective in inducing antitumor responses. These are used as a preventative or therapeutic antitumor vaccine, or ex vivo to stimulate a population of T cells, NK cells or NKT cells for adoptive therapy of cancer (Examples 29).

[0437] 42. DCs Expressing SAg and Tumor Associated Antigens—Production by Processing of Apoptotic Tumor Cells or Tumor Cell Lysates

[0438] DCs expressing SAg and tumor associated antigens are prepared without cell fusion (Example 28). Apoptotic, SAg transfected tumor cells are prepared by first transfecting tumor cells with SAg (Example 1) and then inducing apoptosis by irradiation or other methods well known in the art (Example 28). DCs express aᵥb₅-binding integrins and secrete thrombospondin which ligates vitronectin expressed on the surface of the apoptotic tumor cell. DC surface CD36 binds to its natural ligand, sequestrin, also expressed on apoptotic tumor cells. The apoptotic SAg-expressing tumor cells are phagocytosed and processed by DCs under conditions described in Example 28.

[0439] In another embodiment, lysates of tumor cells optionally expressing SAg are also used as above. Tumor cells are first transformed to express SAg and then lysed (Example 28. These lysates are “fed” top DCs as in Example 28. DCs treated in this way can now present tumor associated antigens along with SAg to the immune system. Alternatively, DCs are first transformed to express SAg, and these cells are allowed to phagocytose or process apoptotic tumor cells or lysates. Optionally the tumor cells may have been previously genetically modified with nucleic acids so that they synthesize b1,3-glucan, LPS, peptidoglycan or Gal Cer. The resulting SAg-expressing DC, after phagocytosing apoptotic tumor cells or lysates, expresses MHC class II, costimulatory molecules CD40, CD80 and CD86, together with SAg and tumor associated antigen. The additional expression of SAg in this system permits more potent activation of T cells, NKT cells and NK cells which recognize the tumor associated antigens expressed on the DC surface in the context of MHC and costimulatory molecules.

[0440] In another embodiment, tumor cells are fused to mammalian cells including but not limited to proximal tubular epithelial cells, other kidney cells including the Madin-Darby canine kidney (MDCK) cell line which express an abundance of alpha anomeric digalactosylceramides which are natural superantigen receptors. In an additional embodiment, tumor cells are fused to cells including but not limited to amphibian intestinal cells which express a high level of phytosphingosine (see Example 25 for cell fusion methodology). The resulting hybrid cells express tumor associated antigens and either galactosylceramides or phytosphingosine. Alternatively, exogenous galactosylceramide or phytosphingosine from the cell membranes of the above kidney or amphibian cells are incorporated into intact tumor cells by methods given in Section 38 and Example 5. These hybrid tumor cells or tumor cells with newly acquired membrane glyco- or phytolipids (TCGP) are further transfected with superantigen nucleic acids to produce hybrid tumor cells or TCGP expressing superantigens, tumor associated antigens, galactosylceramides and/or phytosphingosine (Example 1). These hybrid tumor cells or TCGP are potent activators of T cell, NK cell and NKT cells.

[0441] The DCs, hybrid tumor cells, or TCGP given above are used in a preventative or therapeutic antitumor vaccine (Example 29) or ex vivo to activate T cells, NKT cells or NK cells for the adoptive immunotherapy (Example 29).

[0442] 43. DCs Expressing or Secreting SAg Cotransfected with a Tumor Associated Antigen or “String of Beads” Tumor Antigens

[0443] When a dominant tumor associated antigen (protein) is known, nucleic acid encoding such an antigen are used to transform DCs which already express or secrete SAg (Example 35). Antigens identified by “SELEX” technology which consists of nucleic acids encoding tumor antigens from distinct structural and functional categories of human tumor associated antigens, including mutants, differentiation variants, splice variants, amplified/overexpressed antigens or retroviral antigens may be used. Nucleic acids encoding tumor antigens used to transfect SAg-expressing DCs or DC/tc hybrids. This invention contemplates transfecting with individual nucleic acids encoding a single antigen, or multiples as in a “string of beads” carried by adenoviral or other vectors known in the art (Example 35). Nucleic acids encoding a “string of beads” or tumor associated antigens identified by SERAX may be fused in frame (or cotransfected with) SAg-encoding nucleic acid into DCs or DC/tc. These SAg- and tumor antigen-expressing DCs or DC/tc hybrids are used as a preventative or therapeutic antitumor vaccines (Example 29) or as stimulators ex vivo of T cells, NKT cells or NK cells for adoptive immunotherapy (Example 29).

[0444] Furthermore, nucleic acids encoding proteins listed in Tables I, II, IV and V, for example, angiostatin, protein A, erb/Neu and HSPs, staphylococcal collagen adhesin, are introduced into and expressed in tumor cells or DCs that express or secrete SAg, or into S/D/t cells.

[0445] These cells that coexpressing the proteins and peptides of Tables I, II, IV and V together with SAg are useful as preventative or therapeutic antitumor vaccines (Example 29) or as stimulators ex vivo that activate T cells, NKT cells or NK cells for adoptive immunotherapy (Example 29).

[0446] 44. Naked DNA or RNA Obtained from the Various Cells Described Above That Express and/or Secrete SAg

[0447] DNA containing the CpG backbone is extracted from tumor cells or DCs that express/secrete SAgs or S/D/t cells (Example 30-34). The preferred source of DNA or RNA is the S/D/t cells DCs or tumor cells expressing SAg are also useful. Alternatively, the DNA or RNA can be obtained from DCs, tumor cells or DC/tc into which SAgs were introduced by the cells having phagocytosed SAg-transformed apoptotic tumor cells or tumor cell lysates.

[0448] The extracted DNA or RNA is used as a naked DNA or RNA preventative or therapeutic vaccine (Examples 30-34). Alternatively, this nucleic acid material may be used ex vivo to activate T cell, NKT cells or NK cells adoptive immunotherapy (Example 1, 31 , 33). This extracted DNA or RNA may be used in an initial step of inducing immune reactivity in regional lymph nodes of tumor bearing subjects. After this “priming,” T cells, NKT cells and/or NK cells are harvested from these lymph nodes, expanded in culture in the presence of additional SAg, SAg-expressing DC or tumor cells, or S/D/t cells to generate a T cell, NKT cell or NK cell population for adoptive immunotherapy (Examples 29). DNA or RNA for immunization may also be obtained from the various cells described above that express SAg, and which additionally express or several Staphylococcal adhesins, β-glucans, LPS, peptidoglycans, teichoic acids, mannose, mannan, protein A and/or their respective binding proteins.

[0449] Also useful for naked nucleic acid immunization are bacterial or insect nucleic acids (with CpG motifs) which encode enzymes that catalyze the biosynthesis of β-1,3-glucans, LPS, peptidoglycan, α-Gal, GalCer, teichoic acids, mannan or mannose. Also useful are bacterial or insect nucleic acids that encode the binding proteins for the above carbohydrate-based molecules, glycoprotein lectins that bind the carbohydrate structures, or protein A. Such nucleic acids are used to co-immunize along with SAg expressing DCs or tumor cells or S/D/t cells. Such combined vaccine preparations are used as a preventative or therapeutic antitumor vaccines (Examples 29, 30). Alternatively, they may be used to initiate adoptive T cell therapy by priming regional lymph nodes T cells which are harvested, expanded in vitro by stimulation with S/D/t cells, accompanied by, or followed with IL-2. The tumor antigen-sensitized T cells are reinfused into subjects as described in Example 29.

[0450] 45. Exosomes Derived from (1) SAg-Expressing Tumor Cells (2) SAg Expressing-DCs (3) S/D/t cells or (4) DC/tc Hybrid Cells

[0451] MHC-peptide complexes accumulate in endosomes and lysosomes, which compartments contain MHC class II-enriched internal vesicles that are released outside the cell following direct fusion of the external endosomal membrane with the plasma membrane. These vesicles, termed “exosomes” are capable of stimulating CD4+ T cell clones in vitro. In addition, tumor peptide-pulsed DC-derived exosomes prime specific CTLs in vivo leading to a T cell-dependent eradication or suppressed growth of established murine tumors. In the present invention, the exosomes which have SAgs in addition to tumor associated antigens and MHC class I and class II molecules are prepared. Such preparations are significantly more potent in their ability to induce shrinkage of established tumors and prevent tumor outgrowth.

[0452] Exosomes are prepared from (1) tumor cells or DCs which have been transfected with SAgs (2) S/D/t cells, (3) DCs or hybrid DC/tc which have phagocytosed SAg-expressing apoptotic tumor cells or tumor cell lysates (Example 36). In the above hybrids, either the DC or tumor cell may be transfected with SAg-encoding nucleic acid prior to fusion. The resulting exosomes express MHC class I and class II molecules, SAgs and tumor associated antigen. In order to ensure the routing of the transforming SAg to exosomes, the SAg-encoding nucleic acid should include a sorting signal to localize the SAg to the exosome. These cells may be pulsed with tumor associated antigens shortly before isolation of their exosomes. The isolated exosomes are used as preventative or therapeutic antitumor vaccines (Example 36) or as stimulators ex vivo that activate T cells, NKT cells or NK cells for adoptive immunotherapy (Example 36). These various exosome preparations are extremely effective inducers of anti-tumor responses.

[0453] 46. Cell Surface Display of Recombinant SAg and Tumor Associated Antigens in Bacteria

[0454] Heterologous proteins and various carbohydrate-containing moieties, displayed on the surface of bacterial cells often act as major antigenic systems that stimulate anti-tumor immunity. Such antigens include GalCer, αGal, β1,3-glucans, LPS, peptidoglycans, teichoic acids and mannan. These structures will be referred to below collectively as “anti-tumor motifs.” These structures are created by the action of enzymes encoded by a number of bacterial and fungal genes. For example, Sphingomonas paucimobilis expresses GalCer, or Klebsiella aerobacter expresses -Gal and LPS, and Cryptococcus expresses β1,3-glucan. Because not all the genes responsible for the biosynthesis of these molecules have not been identified, it is difficult to isolate them and introduce them into mammalian cells. These structures are, however, biosynthesized in abundance by bacteria. Immunization with live recombinant bacteria induces both local and systemic immune responses suggesting that gram-positive bacteria might constitute potential live bacterial vaccine delivery systems. The surface molecules of gram-positive bacteria seem to be more permissive for the insertion of extended sequences of foreign proteins than are gram-negative bacteria, in which both translocation through the cytoplasmic membrane and correct integration into the outer membrane are required for proper surface exposure.

[0455] In the present invention, different bacterial surface display systems are used to express natural anti-tumor motifs for developing live bacterial vaccine vehicles. SAgs are provided to bacteria which do not naturally biosynthesize them so that they are expressed together with natural anti-tumor motifs made in the bacteria. These bacteria are then used as preventive or therapeutic antitumor vaccines (Example 28).

[0456] Sphingomonas paucimobilis bacteria express GalCer which can activate the V14 invariant chain expressed by NKT cells. These cells recognizes the galactosylceramide epitope. NK cells, using their NKP1-1 receptors, recognize carbohydrate units such as β1,3-glucans expressed widely on fungi. NK cells are activated directly by SAgs. Further proliferation is induced by interferon produced by T cells in response to the SAg. Humans have natural antibodies specific for the αGal epitope. This epitope is constitutively expressed on several bacteria including Klebsiella aerobacter and E. coli. Coexpression of SAg with the above anti-tumor motifs in recombinant bacteria or fungi provides potent signals to activate NKT cells, T cells and NK cells and to induce production of TH-1 cytokines. The adhesion molecule VCAM-1 expressed by some SAgs such as enterotoxin C contributes to the process by costimulation. Therefore, the SAg expressing bacteria (whether natural or transformed) are capable of activating all of the major cell types involved in the anti-tumor response.

[0457] In the present approach, the preferred SAg is SEB. SEB is introduced for surface display into S. carnosus. E. coli-staphylococcus shuttle vectors are constructed by taking advantage of (1) the promoter signal sequence and propeptide region from the lipase gene construct derived from S. hyicus and (2) the cell surface attachment part of staphylococcal protein A. A 198-amino-acid region, designated ABP (albumin binding protein), is expressed adjacent to the cell wall to increase accessibility to the surface-displayed target peptides. Staphylococcal enterotoxin B is introduced between the lipase propeptide and the ABP region and the surface exposure of the three different regions are tested separately with different assays.

[0458] These recombinant bacteria are useful as a preventative or therapeutic antitumor vaccine (Example 28) or as stimulators ex vivo that activate T cells, NKT cells or NK cells for adoptive immunotherapy (Example 28).

[0459] 47. Introduction of Staphylococcal Collagen Binding Adhesins into DCs Tumor Cells or S/D/t Cells

[0460] Nucleic acids encoding SAgs are transfected into these various cells, as described above, together with nucleic acids encoding Staphylococcal collagen adhesin (SEQ ID NOS:44-45). Mice immunized with a recombinant fragment of the collagen adhesin were protected against Staphylococcus aureus-mediated septic death. Sera from S. aureus-immunized mice promoted phagocytic uptake (opsonized) and enhanced intracellular killing of the bacteria compared to sera from control mice.

[0461] The collagen binding adhesin is isolated from S. aureus strain Cowan. Sequencing of the cloned corresponding gene cna revealed a 133-kDa polypeptide (close to that of 135 kDa reported for the native protein). This protein is proposed to consist of a signal sequence (S) followed by a large nonrepetitive region (A). Immediately following the A region are three consecutive repeats of a 167 amino acid long unit (B1, B2, B3). A cell wall (W) region consisting of 64 amino acid proline-and lysine-rich domain is followed by stretch of hydrophobic amino acids (M), presumably constituting the cell membrane spanning region. Finally, the C-terminus (C) is made up of a few positively charged amino acids. This model structure is used as the starting point to identify the collagen binding domain. The ligand binding site is localized within the 135-kDa S. aureus collagen adhesin. The collagen binding domain is localized to a 168 amino acid long segment [CBD (151-318)] within the N-terminal portion of the adhesin.

[0462] Using biospecific interaction analysis, bovine collagen was found to contain eight binding sites for CBD (151-318), two of which were high affinity and six low affinity. The deduced amino acid sequence of the ligand binding domain of the collagen adhesin is presented. Subsequently a discrete collagen-binding domain within the collagen adhesin was identified and localized to a region between amino acids Asp209 and Tyr233. The FDA strain 574 of S. aureus encodes a 1185 amino acid collagen adhesin. The complete nucleotide sequence of the cna gene as well as a schematic model of the collagen adhesin have been published. The overall structure resembles that of other gram positive surface structures. The lysine and proline rich hydrophilic region which follows the repeated domains resembles a structure in protein A, staphylococcal fibronectin receptor and streptococcal protein G and M proteins. Also present is the hexapeptide LPKTGM which is similar to the consensus sequence LPXTGE which is conserved among other gram positive surface proteins. The hydrophilic region is thought to mediate the binding of the protein to the cell wall. The presence of hydrophobic amino acids which may traverse the membrane followed by a C-terminal cluster of positively charged residues, possibly located on the cytoplasmic side of the membrane, is characteristic of staphylococcal cell surface proteins.

[0463] In the collagen adhesin, a 29 amino acid signal peptide at the N-terminus is followed by a large nonrepetitive A domain, and the highly homologous domains B1, B2 and B3 (probably a result of a series of stepwise gene duplication events). Collagen binding receptors have been found on other species of bacteria such as the 75X adhesin of uropathogenic E. coli. Type 3 fimbrias from pathogenic enteric bacteria, some species of oral streptococci, Streptococcus pyogenes, Yersinia and Treponema pallidium have all been reported to bind various forms of collagen. Thus the collagen binding appears to be a common modality used by pathogenic bacteria of a diverse group to adhere selectively to host tissues and form a focus of infection.

[0464] Nucleic acids encoding staphylococcus collagen adhesin are introduced into SAg-expressing tumor cells or DCs, or S/D/t cells. The cells co-expressing the staphylococcal collagen adhesin with SAgs are useful as a preventative or therapeutic antitumor vaccines (Example 28) or as stimulators ex vivo that activate T cells, NKT cells or NK cells for adoptive immunotherapy (Example 28).

[0465] 48. Co-expression of Anti-Tumor Motifs or their Binding Proteins with SAg

[0466] Tumor cells or DCs expressing SAgs, or S/D/t cells, are transformed with nucleic acids encoding enzymes that catalyze the biosynthesis of anti-tumor motifs, including the αGal epitope, the GalCer epitope, β-1,3-glucans, LPS, peptidoglycan, teichoic acids or a protein or peptide such as Staphylococcal adhesins, protein A, and/or the binding proteins for the above motifs or proteins. Transformation may be achieve using bacterial plasmids or nucleic acids integrated into an appropriate viral vector. These antigenic structures are fundamental units recognized in the primitive host defense mechanisms (“innate immunity”) of invertebrates, but also evoke responses in mammalian immune systems via the TOLL and NFkB systems.

[0467] DNA encoding the galactosyltransferase that synthesizes the saccharide structure containing the αGal epitope, and gene clusters encoding the biosynthetic pathway for LPS are described in Schnaitman C A, et al., Microbiol. Rev. 57: 655-682 (1993). DNA is extracted from bacteria which biosynthesize these molecules and used to transfect DCs, tumor cells, or S/D/t cells For creation of the GalCer structure, the source of DNA is Sphingomonas paucimobilis organisms. Nucleic acids encoding the pathways for biosynthesis of β-1,3-glucans, peptidoglycans, and protein A have been cloned from insects and Staphylococcus aureus, respectively. These nucleic acids are cloned into suitable expression vectors and introduced into the target cells. Resulting S/D/t cells thus express SAg as well as the anti-tumor motif structure.

[0468] S/D/t cells that co-express Gal can interact with and stimulate NKT cells through the Val4 invariant chain which naturally recognizes the -galactosylceramide epitope. NK cells, via their NKP1-1 receptors, will recognize carbohydrate units such as β-1,3-glucans on the S/D/t cells. The co-expressed SAg induces further NKT cell expansion. The SAg is also capable of inducing massive proliferation of conventional T cells which can be further promoted by the co-expression of B7-1, B7-2 and ICAM-1 which are normally expressed on DCs. VCAM-1, expressed by some SAgs such as enterotoxin C, also is capable of contributing to this stimulation. As indicated above, NK cells are activated directly or indirectly by T-cell derived interferon.

[0469] The S/D/t cells (as well as tumor cells or DCs expressing SAg) that also express one or more of the anti-tumor motifs are capable of activating all of the major cell types involved in anti-tumor immunity: T cells specific for peptides, NKT cells reactive with lipoproteins and glycosylceramides and NK cells that recognize for oligosaccharides. These cells are useful as preventative or therapeutic antitumor vaccines (Examples 29) or as stimulators ex vivo that activate T cells, NKT cells or NK cells for adoptive immunotherapy (Example 29).

[0470] 49. Sags Combined with Low Density Lipoproteins (LDL), Oxidized LDL (oxy LDL) Oxidized LDL Mimics and Apolipoproteins

[0471] In the present invention, low density lipoproteins (collectively LDL) intermediate density LDL (IDL), chylomicrons, very low density lipoproteins (VLDL), oxidized LDL (oxyLDL), oxyLDL mimics as well as and apolipoproteins including but not limited to apolipoprotein (a), B1000 and E4 are conjugated to superantigens and are useful as anti-cancer agents alone. LDLs, oxyLDLs and apolipoproteins are physically trapped or bind to receptors expressed in the dense network of randomly branching blood vessels and sinusoids of the tumor neovasculature and have the capacity to deposit or bind to LDL receptors on the tumor endothelium and to scavenger recepors on macrophages OxyLDL or apolipoproteins bound to tumor endotheium or macrophages they induce apoptosis or they promote inflammation by activating vascular cells and macrophages to generate cytokines, chemoattractants and tissue factor.

[0472] Superantigens in nucleic acid or polypeptide form are conjugated to the lipoproteins and amplify the inflammatory effect of the lipoproteins by inducing apoptosis of endothelial cells, upregulating endothelial cell integrins, adhesins and procoagulant activity whicle activating macrophages and immunocytes. Any tumor which is neovascularized is eligible for this therapy. These conjugates therefore have the advantages of localizing to disseminated and neovascularized tumor, inducing apoptosis and initiating a powerful anti-tumor response.

[0473] Lipoproteins

[0474] Lipoproteins are globular particles of high molecular weight that transport nonpolar lipids (primarily triglycerides and cholesterol esters) through the plasma. Lipoproteins have been classified on the basis of their densities into five major classes: chylomicrons, very low density lipoproteins (VLDL), intermediate-density lipoproteins (IDL), low-density lipoproteins (LDL), and high-density lipoproteins (HDL). The physical-chemical characteristics of the major lipoprotein classes are presented in Table The core of the spherical lipoprotein particle is composed of two nonpolar lipids hydrophobic lipids, triglyceride and cholesteryl ester, which are present in different lipoproteins in varying amounts. This hydrophobic core accounts for most of the mass of the particle, and consists of triglycerides and cholesterol esters in varying proportions. Surrounding the core is a polar surface coat of phospholipids that stabilize the lipoprotein particle so that it can remain in solution in the plasma. Variable amounts of unesterified cholesterol are interdigitated with the phospholipids of the surface coat. In addition to phospholipid, the polar coat contains small amounts of unesterified cholesterol. Each lipoprotein particle also contains specific proteins (termed apoproteins) that are exposed at the surface and extend into the core. The apoproteins bind specific enzymes or receptors on tumor microvascular cells.

[0475] Chylomicrons

[0476] Chylomicrons are large lipoprotein particles formed within intestinal epithelial cells from dietary triglycerides and cholesterol which are secreted into the intestinal lymph and pass into the general circulation where they adhere to LDL receptors on the tumor microcapillaries. Chylomicron remnants are removed by both LDL receptors and LDL-receptor related protein/alpha2-macroglobulin receptor (LRP). While bound to these endothelial surfaces, the chylomicrons are exposed to the enzyme lipoprotein lipase. The chylomicrons contain an apoprotein, apoprotein CII, that activates the lipase, liberating free fatty acids and monoglycerides.

[0477] Very Low Density Lipoprotein (VLDL)

[0478] Very low density lipoprotein (VLDL)are triglyceride rich particles which are secreted from the liver into the bloodstream after conversion of carbohydrate to glycerol-esterified fatty acids to form triglycerides. VLDL particles are relatively large, carry 5 to 10 times more triglycerides than cholesteryl esters, and contain a form of apoprotein B, designated B100, that differs from the apoprotein B48 of chylomicrons. The VLDL particles are transported to LDL receptors on tumor microcapillaries, where they interact with the same lipoprotein lipase enzyme that catabolizes chylomicrons. VLDL also binds to the VLDL receptor via apolipoprotein E and lipoprotein lipase. Both apolipoprotein E and lipoprotein lipase are constituents of chylomicron remnants which are a physiological ligand for the VLDL receptor.

[0479] Plasma Apolipoproteins

[0480] Plasma apolipoproteins have a central role in plasma lipid transport. Central to the functions of all apolipoproteins (apo) is specialized regions termed amphiphathic helices which have the ability to bind phospholipids. The amphiphatic helices in apoA-I, apoA-II, and apoC-III comprise multiple repeats of 22 amino acids or 22-mer periodicity each consisting of a tandem array of two 11-mers which tend to begin or end with a proline.

[0481] The characteristic spatial arrangement of the hydrophobic and hydrophilic amino acids within the amphipathic helices is that the hydrophobic face is intercalated between the fatty acyl chains of phospholipids and the hydrophilic face is located close to the polar head groups of phospholipids. Such an orientation allows the interaction of protein domains with lipoprotein-modifying enzymes and cellular receptors that control the catabolism of lipoproteins (Lp) and their removal from the circulation. The major apolipoproteins useful in the present superantigen-apolipoprotein conjugates are as follows:

[0482] Apolipoprotein (a)

[0483] Apolipoprotein (a) (Lp (a)) is made by hepatocytes and is secreted into plasma where it forms a covalent linkage by a single interchain disulfide bond to a unique multikringle glycoprotein, with apo B100 of LDL to form lipoprotein(a), called aploliprotein(a). Protein apo (a) has structural similarities to plasminogen and consists of multiple bent repeats of amino acid sequences. Apolipoprotein (a) exists in polymorphs distinguished by molecular weights. The molecular basis for the size variation of apo[a] is primarily due to multiple apo[a] alleles that differ in the number of kringle type 2 (plasminogen kringle type 4) repeats. Minor variability in apo(a) size might be due to differences in glycosylation, as carbohydrates make up 25-40% of the apo (a) weight.

[0484] A close structural similarity exists between apo(a) and plasminogen a protease zymogen whose active form cleaves fibrin to dissolve blood clots, is activated by tissue and urokinase plasminogen activators via cleavage at a specific arginine residue. Indeed, in-vitro and ex-vivo studies have shown that apo(a) binds to immobilized fibrin (fibrinogen), to the plasminogen receptor on endothelial cells and competes with tissue plasminogen activator in converting plasminogen to plasmin. Lipoprotein(a) also competes with plasminogen for its high-affinity binding sites in endothelium, platelets, and macrophages. Because of structural homology with plasminogen apo(a)I competively inhibits fibrin-dependent activation of plasminogen to plasmin and plasmin-mediated activation of cytokine transforming growth factor-b. Hence, Lp(a) is capable of interfering with the fibrinolytic process by acting as a procoagulant. The colocalization of apo(a) with fibrin (fibrinogen) in the arterial wall further suggests that Lp(a) is thrombogenic.

[0485] Lp(a) is a poor ligand for the LDL receptor and is consequently taken up and degraded by unregulated mechanisms, leading to tissue accumulation. Lp(a) is targeted to uptake by macrophages, presumably through the scavenger-receptor pathway. Owing to the lower B-carotene content, Lp(a) may be more easily oxidized than LDL. Oxidized Lp(a) such as Lp(a) modified by malondialdehyde, a product generated in vivo from aggregated platelets, is avidly taken up by monocyte-macrophages, through the scavenger-receptor pathway. Lp(a) accumulates in either the arterial wall and in vein grafts, respectively suggesting that Lp(a) can also traverse the endothelium of arterial vessels and reach the intima by non-receptor-mediated mechanisms and that this transport process is influenced by the density/size of Lp(a). There, Lp(a) can form complexes with such tissue-matrix components as proteoglycans, glycosaminoglycans, and collagen as well as fibrin. The magnitude of the transfer of Lp(a) from the plasma compartment to the arterial wall is larger when plasma Lp(a) levels are elevated because of a gradient effect or because of a possible direct action of Lp(a) on arterial permeability.

[0486] Apolipoprotein B

[0487] Apolipoprotein B occurs in two forms termed apoB-100 and apoB-48. In humans apoB-48 is produced only by the intestine and apolipoprotein B-100 originates from the liver. Apolipoprotein B-100, which contains 4536 amino acid residues, is the major apolipoprotein of VLDL, IDL, Lp(a) and is the sole apolipoprotein of LDL. ApoB-48 consists of the amino-terminal half of apoB-100, contains 2152 amino acid residues and is devoid of binding domain for the LDL receptor.

[0488] Apolipoprotein E4

[0489] Apolipoprotein (apo) E is a 34-kCa protein coded for by a gene on chromosome 19 and plays a prominent role in the transport and metabolism of plasma cholesterol and triglyceride through its ablity to interact with the low density lipoprotein (LDL) receptor and the LDL receptor related protein (LRP). Apolipoprotein E (apoE) is a 34-kda protein component of lipoproteins that mediates their binding to the low density lipoprotein (LDL) receptor and to the LDL receptor-related protein (LRP). Apolipoprotein E is a major apolipoprotein in the nervous system, where it is thought to redistribute lipoprotein cholesterol among the neurons and their supporting cells and to maintain cholesterol homeostasis. Apart from this function, apoE in the peripheral nervous system functions in the redistribution of lipids during regeneration.

[0490] Oxidized LDL

[0491] LDL is also rapidly transported across an intact endothelium and becomes trapped in the three-dimensional cage work of fibers and fibrils secreted by the artery wall cells. This concentration-dependent process does not require receptor-mediated endocytosis. LDL entrapped in arteries or bound to receptors on endothelium or the tumor microcirculation undergoes diverse enzymic and chemical modifications. It can also be introduced into the cell a variety of lipophilic invaders such as lipid peroxidation products and cholesterol oxides that may irreversibly modify cellular functions. The early oxidative modification of the trapped LDL in vivo occurs before monocytes are recruited and results in the oxidization of lipids in LDL with little change in apoB.

[0492] Monocytes recruited to the lesion, are converted into macrophages and the LDL lipids are further oxidized. Once the LDL contains fatty acid lipid peroxides, there follows (especially in the presence of metal ions) a rapid propagation that amplifies dramatically the number of free radicals and leads to extensive fragmentation of the fatty acid chains with the generation of a broad spectrum of oxysterols, shorter-chain aldehydes (e.g., malondialdehyde and 4-hydroxynonenal) some of which involve the covalent binding of short-chain substituents to the amino groups of lysine residues in apoprotein B (and possibly to other portions of the apoprotein B molecule) masking lysine 6-amino groups. Acetyl LDL and scavenger receptors recognize modifications effected by chemical acetylation and highly oxidized LDL.

[0493] Incubation of LDL with endothelial cells, smooth muscle cells, and macrophages in vitro induces oxidation of polyunsaturated fatty acids. Lipid peroxides formed fragment fatty acyl chains and attach covalently to apoB or fragments thereof, thereby rendering the modified particles competent for endocytosis by the scavenger receptor. LDL particles also undergo peroxidation of polyunsaturated fatty acids which produces oxidative modification and conversion of LDL lecithin to lysolecithin.

[0494] Modification of LDL with malondialdehyde, a product of arachidonic acid metabolism or oxidation of LDL leads to foam cell formation. Unlike native LDL, oxidized LDL is mitogenic or induces apoptosis in arterial endothelial and smooth muscle cells. It also induces endothelial cells and monocytes to express high levels of tissue factor and plasminogen activator inhibitor. Levels of P-selectin are increased intracellularly and are released by oxy-LDL which can also directly stimulate PDGF production in endothelial cells. Oxidized LDL also induce the expression of endothelin, to inhibit the expression of nitric oxide synthase, and to inhibit the resulting vasodilation. Platelet accumulation and local increases in thromboxane A, serotonin, ADP, platelet activating factor, and activated thrombin, together with a local reduction in prostacyclin further contribute to a procoagulant state.

[0495] Another stable end product of cellular oxidative modification of LDL is lysophosphatidylcholine, which is generated by phospholipase A2 hydrolysis. This lipid selectively induces the expression of adhesion molecules for monocytes, vascular cell adhesion molecule-1 (VCAM-1), and ICAM-1 in cultured human arterial endothelial cells. TNF-α activation is a prerequisite for the observed lysophosphatidylcholine induction of VCAM-1. Lysophosphatidylcholine also induces monocyte chemotaxis, arrests macrophage migration and induces macrophage proliferation through SR-A-mediated internalization of modified lipoprotein. Finally, lysophosphatidylcholine induces gene expression for smooth muscle/fibroblast growth factors, the A and B chains of PDGF, and heparin-binding epidermal growth factor-like protein in cultured endothelial cells.

[0496] oxy LDL Mimics

[0497] The cytotoxic effects of highly oxidized LDL are mimicked by higher concentrations of oxysteroid, particularly 7b-hydroperoxycholesterol, 7b-hydroxycholesterol, 7-ketocholesterol and 5α-6α-epoxycholesterol. These oxysterols can induce apoptosis in a variety of cells. Of these end products, 73-hydroperoxy-choles-5-en-3β-ol has been identified as the primary cytotoxin in highly oxidized LDL. This molecule accounts for approximately 90% of the cytotoxicicy of lipids extracted from highly oxidized LDL in vitro. Fatty acid hydroperoxides and aldehydes found in oxidized LDL also alter intracellular functions. For example, 4-hydroxynonenal (4-HNE). a component of oxidized LDL, induces binding of the coagulation protein, Factor Xa to endothelial cells. In addition, oxidized LDL and mm-LDL can significantly induce the release of IL-1 from macrophages. Saponified Cu²+-oxidized LDL and mm-LDL have been shown to contain 9-HODE, 13-HODE, and cholesterol-9-HODE, which increase IL-1 release from macrophages. 4-HNE also causes a variety of effects on monocytes, including stimulation of monocyte migration through induction of chemoattractant proteins and initiation of apoptosis

[0498] Mildly Oxidized LDL (mm-LDL)

[0499] Mildly oxidized LDL (mm-LDL) induces elevated levels of cAMP by a G protein-mediated mechanism and induces inflammatory molecules both by increasing the rates of gene transcription and by stabilizing the mRNA for these genes. Exposure of the arterial wall to (mm-LDL) or biologically active products of lipid peroxidation results in binding to the LDL-R. mm-LDL also induces monocytes to bind to endothelial cells, and induces changes which affect monocyte binding, tethering, activation, and attachment. mm-LDL also induces an inflammatory phenotype in endothelial cells and proinflammatory cytokines accompanied by increase the levels of the transcription factor, NF kB, which has been linked to the expression of a variety of adhesion molecules. In particular, lysophosphosphatidylcholine, a product of LDL oxidation, has been shown to be a chemoattractant for monocytes and T-lymphocytes, to induce the adhesion molecules VCAM-1 and ICAM-1, and to increase levels of PDGF and heparin-binding epidermal growth factor mRNA in endothelial cells and smooth muscle cells. Increases in ICAM-1 expression lead to enhanced monocyte adhesion to the vessel wall.

[0500] Moreover, mm-LDL induces endothelial cells to produce the potent monocyte activators monocyte chemoattractant protein 1 (MCP-1) and monocyte colony stimulating factor (M-CSF). Macrophage Class A scavenger receptors and CD36, a Class B scavenger receptor are up-regulated by M-CSF. Once bound to specific scavenger receptors, mm-LDL can initiate cell signaling events in vascular cells stimulating phosphoinositide metabolism and calcium flux as well as stimulate phospholipase E1 activity through a tyrosine kinase-dependent mechanism independent of protein kinase C. This induces the release of phosphatidic acid or arachidonic acid for eicosanoid production in the vessel wall. A portion of this activity may be mediated by the Class A scavenger receptor ligands which stimulate macrophage urokinase expression and IL-1 production a growth factor for smooth muscle cells.

[0501] The biological properties of the lipids in mildly oxidized LDL differ from those induced by the lipids in highly oxidized LDL. For example, the expression of tissue factor by endothelial cells is induced by mildly oxidized LDL but not by highly oxidized LDL. The lipids in highly oxidized LDL are cytotoxic, whereas the lipids in mildly oxidized LDL are not. Mildly oxidized LDL induced the activation of the NFKB-like transcription factor and the increase in the appearance of specific oxidized phospholipids. With continued oxidation, highly oxidized LDL such as lysophosphatidylcholine and oxidized sterols are produced with different biological activity as given above.

[0502] The ability of mm-LDL to induce monocyte adherence to endothelial cells is mimicked by three polar bioactive lipids isolated from mm-LDL as well as oxidized 1-palmitoyl-2-arachidonyl-sn-glycerophosphocholine. The molecular structure of two bioactive lipids were identified 1-palmitoyl-2-(5-oxovaleryl)-sn-glycero-3-phosphocholine (m/t 594.3) and 1-palmitoyl-2-glutaryl-sn-glycero-3-phosphocholine (m/t 610.2). The third lipid (m/t 831) has tentatively been described as an arachidonic acid-containing phospholipid containing three or four oxygen molecules, potentially forming a conjugated triene structure characteristic of leukotrienes. The latter serves as a substrate for paraoxonase, and those with fragmentation products such as 5-oxyvalerate at the sn-2 position may represent substrates for PAF acetylhydroxylase.

[0503] Glycated LDL

[0504] Glycated LDL is recognized less well by the LDL receptor, but is taken up more rapidly by macrophages. Very prolonged exposure of LDL to high concentrations of glucose leads to glucose-mediated cross-linking and the generation of advanced glycosylation end products, which macrophages recognize in a specific saturable fashion.

[0505] Artificial Complexes of LDL

[0506] Artificial complexes of LDL formed by incubation with fibronectin, heparin, and fibrillar collagen are also candidates, and the uptake there appears to be through recognition of the fibronectin. Complexes of LDL with itself are taken up more rapidly than native LDL via the LDL receptor. After incubation with neutrophils LDL is taken up more rapidly by macrophages. This is attributable to the dimerization of LDL by the action of secreted neutrophil elastase on native LDL

[0507] Apoprotein Genes

[0508] The genes for the major apoproteins associated with the lipoproteins have been cloned. These include apolipoprotein (a) (McLean J W Nature 330: 132-137 (1987)), apolipoprotein B-100 (Chen S H J. Biol Chem. 261: 12918-12921 (1986)), apolipoprotein E4 provided by Drs. S Lauer and J. Taylor. Lp(a) has been cloned from cDNA libraries constructed from human liver mRNA (McLean J W Nature 330: 132-137 (1987)). Complete sequence analysis of a 14,000-base-pair (bp) DNA copy of apo(a) mRNA showed many exact or nearly exact repeats of a 342-bp sequence occurred. Indeed, most of the mRNA consist of 22 tandem exact repeats and 15 modified repeats. Apolipoprotein (a) belongs to a gene family that includes genes encoding clotting factors, structural proteins, and growth factors. Domains shared by these proteins are protease-like domains, kringle units, calcium binding domains, and epidermal growth factor precursor domains.

[0509] In the present invention, superantigens are ligated to the major classes of lipoproteins in human plasma including LDL, IDL, HDL, VLDL, chylomicons and remnants containing apoproteins and mm-LDL, oxy LDL isosterols, inositols, lysophosphatidlycholine, synthetic mimics of LDL activity and oxyLDL byproducts by methods given in Example 47. Because of their unique capacity to adhere to tumor microvasculature and evoke an apoptotic/inflammatory/prothrombotic response, the lipoprotein structures preferred for ligation to SAg include but are not limited to Lp(a), LpB-1000 or B-47, oxyLDL, oxyLDL byproducts, oxyLDL mimics and IDL.

[0510] The lipoproteins used for conjugation are prepared as in Examples 48-49. The superantigens used for conjugation are preferentially in nucleic acid or phage form but may also be in peptide, polypeptide nucleic acid or phage display form. They are coupled to the various LDL, oxyLDL or apolipoproteins via methods given in Examples 3, 5, 47. Alternatively, SAg are incorporated or bound or conjugated to a vesicular, exosomal structures shed from normal, tumor or sickled cells expressing LDL, oxy LDL, oxyLDL mimics or apolioproteins.

[0511] Superantigens are also integrated into liposomal structures prepared to express natural or synthetic LDL, oxyLDL, apolipoprotens or oxyLDL mimics as described in Section 45 and Examples 3, 5, 6, 36, 42. Optionally, integrin ligand sequences such as RGD are added to facilitate the localization of the conjugates to the tumor microvasculature binding to the aᵥb₃ integrin and aᵥb₅ integrin which are expressed therein (see Example 6). These superantigen-lipoprotein conjugates are physically trapped in the dense network of randomly branching blood vessels of the tumor microcirculation and also bind to LDL or scavenger receptors expressed in the tumor neovasculature.

[0512] Constructs consisting of naked Sag nucleic acids containing CpG backbone fused to apoprotein nucleic acids alone or incorporated into liposomes are prepared as in Example 3, 6, 14, 30-31 and delivered to the tumor sites in vivo as in Examples 14, 30-31. These constructs are useful in vivo as a therapeutic antitumor vaccines according to Examples 14, 15, 16, 18-23. They are also usefull ex vivo for producing a population of tumor specific effector T or NKT cells for adoptive immunotherapy of cancer (Examples 2-5, 7, 15, 16, 18-23).

[0513] Tumor Cells or Sickled Erythrocytes and Vesicles Expressing SAg and Apolipoproteins

[0514] Superantigen nucleic acids are fused in frame to nucleic acids encoding apoproteins including but not limited to apoproteins Lp(a), B-48 and 100 and E3 and transfected into tumor cells in vivo to produce tumor cells expressing superantigens and apoproteins. These tumor cells are recognized by apoprotein receptors in tumor microvasculature. Tumor cells are also transfected ex vivo with the identical nucleic acid constructs. A RGD sequence is added to promote deposition in the tumor microvasculature which are useful. These tumor cell transfectants expressing Sag, apoprotein and RGD bind to apoprotein receptors and integrins respectively expressed in tumor microvasculature wherein they initiate a potent and localized anti-tumor response.

[0515] Superantigen nucleic acids together with nucleic acids encoding either apo(a), apoB and apoE4 are also transfected into nucleated sickled erythrocytes (e.g., proerythroblast or normoblast phase) by methods given in Examples 1 and 6. The integrin ligand RGD nucleic acids are transfected into tumor cells or sickled cells to facilitate the localization of the transfected tumor cells and sickled cells to integrins expressed in the tumor neovasculature in vivo (see Example 6). Alternatively, the sickled erythrocytes or tumor cells acquire the apolipoprotein or oxyLDL by coculture with liposomes which express the apolipoprotein or oxyLDL (see Section 7 & Example 5).

[0516] These tumor cells or sickle cell transfectants are administered parenterally and are capable of trafficking to tumor microvasculature wherein they bind to apolipoprotein and scavenger receptors on endothelial cells and macrophages. The transfectants are phagocytosed by macrophages cells and induce endothelial cell apoptosis. SAgs expressed on the tumor cells and sickle cells also induce a local T cell inflammatory anti-tumor response which envelops the neighboring tumor cells.

[0517] These tumor cell and sickle cell constructs are prepared by methods given in Examples 1 & 6 and are useful in vivo against primary and/or metastatic tumors according to Examples 14, 15, 16, 18-23.

[0518] Tumor Cells & Endothelial Transfected in vivo with SAg and Lipoprotein Receptors or Oxidized Lipoprotein Receptors

[0519] The genes encoding the LDL oxyLDL, VLDL, LRP, CD36, SREC and LOX-1 receptors as well as macrophage scavenger receptors, expressed on endothelial cells and macrophages and have been cloned. Nucleic acids encoding receptors for various apolipoproteins including but not limited to the LDL or apo a, apoB or apo E receptor, CD36 receptor, LRP receptor, macrophage scavenger receptor, endothelial cell oxyLDL receptor (LOX-1) and endothelial cell scavenger cell receptor (SREC) alone or together with nucleic acids encoding superantigens are injected directly into tumor sites. The same nucleic acids are transfected into tumor cells in vivo. Transfection of these receptors into tumor cells and tumor microvascular endothelial cells results in the expression of the LDL receptor protein with high affinity binding specificity for LDL oxyLDL and Lp(a).

[0520] Exposure of the transfected tumor cells or endothelial cells to exogenously introduced oxidized LDL (especially sterol and lysocholinephosphatidic acid) induces tumor endothelial cell apoptosis analogous to that seen in endothelial cell after exposure to oxyLDL. The transfected tumor cells internalize and degrade the oxyLDL and because they, like macrophages, have no means of down regulating the scavenger receptor are transformed to “foam cells” and undergo apoptosis.

[0521] LDL Receptor (LDL-R)

[0522] The high affinity receptor for LDL known as the apoB receptor or the LDL receptor (LDL-R) found on tumor microvascular cells as well as hepatic cells and macrophages binds LDL, VLDL and chylomicron remnants via their associated apoproteins. Apolipoprotein B-100 gene has been cloned (Chen S H J. Biol Chem. 261: 12918-12921 (1986)). The LDL gene is more than 45 kilobases in length and contains 18 exons. Thirteen of the 18 exons encode protein sequences that are homologous to sequences in other proteins: five of these exons encode a sequence similar to one in the C9 component of complement; three exons encode a sequence similar to a repeat sequence in the precursor for epidermal growth factor (EGF) and in three proteins of the blood clotting system (factor IX, factor X, and protein C); and five other exons encode nonrepeated sequences that are shared only with the EGF precursor. Tb LDL receptor appears to be a mosaic protein built up of exons shared with different proteins, and it therefore belongs to several supergene families (Sudhof T C et al., Science 228: 815-22 (1985)).

[0523] Regulation of LDL-R expression occurs primarily at the transcriptional level and is controlled by levels of free cholesterol in the cell. Inflammatory mediators such as growth factors and cytokines can promote the binding and uptake of LDL. These mediators include PDGF, TGF-β basic fibroblast growth factor, TNFα, and IL-1. Some of these mediators, such as TNF-α and IL-1, affect transcriptional regulation of the LDL-R gene at the level of the promoter.

[0524] VLDL Receptor

[0525] The VLDL receptor has been described as a new member of the LDL receptor supergene family that specifically binds VLDL and chylomicron remnants via apolipoprotein E and lipoprotein lipase. Both apolipoprotein E and lipoprotein lipase are constituents of chylomicron remnants, and a physiological ligand for the VLDL receptor (Niemeier A et al., J. Lipid Res. 37: 1733-42 (1996)).

[0526] LRP Receptor

[0527] The alpha 2-macroglobulin receptor or lipoprotein receptor-related protein (LRP) (LRP) is a cell—rapidly internalizes several plasma proteins. These include alpha 2-macroglobulin-protease complexes, free plasminogen activators as well as plasminogen activators complexed with their inhibitors, and beta-migrating very low density lipoproteins complexed with either apolipoprotein E or lipoprotein lipase tissue and urokinase-type plasminogen activators, plasminogen activator inhibitor-1, lipoprotein lipase, and lactoferrin. The active receptor protein is derived from a 600-kDa precursor, encoded by a 15-kb mRNA, cloned and sequenced in human, mouse, and chicken. The entire human gene (LRP1) coding for A2MR/LRP has been cloned. The gene covers about 92 kb and a total of 89 exons, varying in size from 65 bases (exon 86) to 925 bases (exon 89) have been identified. The introns vary from 82 bases (intron 53) to about 8 kb (intron 6). In the introns, 3 complete and 4 partial Alu sequences have been identified. Interexon PCR from exon 43 to 45 yielded a fragment of 2.5 kb. Attempts to subclone this fragment yielded inserts ranging between 0.8 and 1.6 kb. Sequencing of 3 subclones with different-size inserts revealed a complex repetitive element with a different size in each subclone. In the mouse LRP gene this intron is much smaller, and no repetitive sequence was observed. In 18 unrelated individuals no difference in size was observed when analyzed by interexon PCR (Van leuven, F et al., Genomics 24: 78-89 (1994))

[0528] The LRP receptor is mainly responsible for the binding and internalization of chylomicron remnants as well as apoE-containing HDL. ApoE-containing lipoproteins are taken up and degraded by receptor-mediated endocytosis. Apolipoprotein E3- and apoE4-containing lipoproteins have a similar binding affinity and cause a similar degree of lipoprotein internalization via the LDL-R and the LRP. LRP can mediate the degradation of tissue factor pathway inhibitor (TFPI), a Kunitz-type plasma serine protease inhibitor that regulates tissue factor-induced blood coagulation

[0529] The 39-kDa receptor-associated protein (RAP) associates with the multifunctional low density lipoprotein (LDL) receptor-related protein (LRP) and thereby prevents the binding of all known ligands, including alpha 2-macroglobulin and chylomicron remnants. RAP is predominantly localized in the endoplasmic reticulum and functions as a chaperone or escort protein in the biosynthesis or intracellular transport of LRP. RAP promotes the expression of functional LRP in vivo and stabilizes LRP within the secretory pathway.

[0530] Macrophage Scavenger Receptors

[0531] Scavenger receptors mediate the endocytosis of chemically modified lipoproteins, such as acetylated low density lipoprotein (Ac-LDL) and oxyLDL. Functional MSR are trimers of two C-terminally different subunits that contain six functional domains. The MSR gene has been cloned in an 80-kilobase human and localized to band p22 on chromosome 8 by fluorescent in situ hybridization and by genetic linkage using three common restriction fragment length polymorphisms. The human MSR gene consists of 11 exons, and two types of mRNAs are generated by alternative splicing from exon 8 to either exon 9 (type II) or to exons 10 and 11 (type I). The promoter has a 23-base pair inverted repeat with homology to the T cell element. Exon 1 encodes the S-untranslated region followed by a 1 2-kilobase intron which separates the transcription initiation and the translation initiation sites. Exon 2 encodes a cytoplasmic domain, exon 3, a transmembrane domain, exons 4 and 5, an alpha-helical coiled-coil and exons 6-8, a collagen-like domain. The position of the gap in the coiled coil structure corresponds to the junction of exons 4 and 5. The human MSR gene consists of a Macrophage scavenger receptors (MSR) mediate the binding, internalization, and processing of a wide range of negatively charged macromolecules. Functional MSR are trimers of two C-terminally different subunits that contain six functional domains. The MSR gene has been cloned in an 80-kilobase human and localized to band p22 on chromosome 8 by fluorescent in situ hybridization and by genetic linkage using three common restriction fragment length polymorphisms. The human MSR gene consists of 11 exons, and two types of mRNAs are generated by alternative splicing from exon 8 to either exon 9 (type II) or to exons 10 and 11 (type I). The promoter has a 23-base pair inverted repeat with homology to the T cell element. Exon 1 encodes the S-untranslated region followed by a 1 2-kilobase intron which separates the transcription initiation and the translation initiation sites. Exon 2 encodes a cytoplasmic domain, exon 3, a transmembrane domain, exons 4 and 5, an alpha-helical coiled-coil, and exons 6-8, a collagen-like domain. The position of the gap in the coiled coil structure corresponds to the junction of exons 4 and 5. The human MSR gene consists of a mosaic of exons that encodes the functional domains. Furthermore, the specific arrangement of exons played a role in determining the structural characteristics of functional domains (Emi M et al., J. Biol. Chem. 268: 2120-5 (1993)).

[0532] Scavenger receptors on tumor endothelium and stroma bind oxidized LDL, apoptotic cells, and anionic phospholipids. Class A receptors, includes the type I and II macrophage scavenger receptors (SR-M and SR-MI). They are found predominantly on macrophages and activated smooth muscle cells. SR-M and SR-MI are homotrimeric membrane proteins, which are derived from alternatively spliced mRNA products of a single gene. Ligands for class A receptors include acetylated LDL, oxidized LDL, fucoidan, and carrageenan. The second class, Class B scavenger receptors, includes CD36 and SR-E1, which are found in adipose tissue, lung, liver, and macrophages.

[0533] Acetyl LDL Receptor

[0534] Acetyl LDL receptor or the scavenger receptor, is distinct from the LDL receptor and does not recognize native LDL. It has been found on tumor microvascular cells as well as monocyte/macrophages, Kupfer's cells, and endothelial cells, particularly the sinusoidal endothelial cells in the liver. The same receptor also recognizes other chemically modified forms of LDL, including acetoacetyl LDL and malondialdehyde-conjugated LDL. The acetyl LDL receptor binds OxLDL LDL modified by incubation with cultured endothelial cells. LDL incubated with cultured endothelial cells for 12 to 18 hours, undergoes a physical and chemical changes and the resulting endothelial cell-modified form of LDL is taken up by cultured macrophages 10 times more rapidly than native LDL. Thus, all three the major cell types in the artery wall can convert LDL to a form recognized by the acetyl LDL receptor.

[0535] CD36 Receptor CD36, a multigland glycoprotein structurally related to SR-BI and CLA-1 found on monocytes, endothelial cells is a high affinity receptor for the native lipoproteins HDL, LDL, VLDL and for OxLDL and AcLDL. The CD36 gene has been cloned (Endemann G et al., J. Biol. Chem. 268:11811-6 (1993)).

[0536] Endothelial Receptors for OxyLDL: The LOX-1 Receptor (C-Type Lectin Receptor) & Scavenger Receptor Expressed by Endothelial Cells (SREC)

[0537] Endothelial dysfunction or activation elicited by oxidatively modified low-density lipoprotein (Ox-LDL) is characterized by intimal thickening and lipid deposition in the arteries. Ox-LDL and its lipid constituents impair endothelial production of nitric oxide, and induce the endothelial expression of leukocyte adhesion molecules and smooth-muscle growth factors. Vascular endothelial cells in culture and in vivo internalize and degrade Ox-LDL through a putative receptor-mediated pathway that does not involve macrophage scavenger receptors.

[0538] LOX-1 Receptor

[0539] LOX-1, a novel receptor for oxy-LDL, is a membrane protein that belongs structurally to the C-type lectin family, and is expressed in vivo in vascular endothelium and vascular-rich organs. The LOX-1 receptor from vascular endothelial cells has been cloned (Hoshikawa H et al., Biochem. Biophys. Res. Commun. 245: 841-6 (1998)). Mouse LOX-1 is composed of 363 amino acids with a C-type lectin domain type II membrane protein structure and triple repeats of the sequence in the extracellular “Neck domain,” which is unlike human and bovine LOX-1. LOX-1 binds oxidized LDL with two classes of binding affinity in the presence of serum. The binding component with the higher affinity showed the lowest value of Kd among the known receptors for oxidized LDL. With respect to ligand specificity, LOX-1 is a receptor for oxy-LDL but not for Ac-LDL and recognizes a protein moiety of oxy-LDL with a ligand specificity that is distinct from other receptors for oxy-LDL, including class A and B scavenger receptors.

[0540] Scavenger Receptor Expressed by Endothelial Cells (SREC)

[0541] The primary structure of the SREC molecule has no significant homology to other types of scavenger receptors, including the LOX-1 receptor. The cDNA encodes a protein of 830 amino acids with a calculated molecular mass of 85, 735 Da (mature peptide). The cloned has an N-terminal extracellular domain with five epidermal growth factor-like cysteine pattern signatures and long C-terminal cytoplasmic domain (391 amino acids) composed of a Ser/Pro-rich region followed by a Gly-rich region (Adachi H et al., J. Biol. Chem. 272:31217-20 (1997)

[0542] The SREC mediates the binding and degradation of acetoacetylated (AcAc) and acetylated (Ac) low density lipoproteins (LDL). Isolated sinusoidal endothelial cells from the rat liver show saturable, high affinity binding of AcAc LDL and degrade AcAc LDL 10 times more effectively than aortic endothelial cells. Specific sinusoidal endothelial cells bearing the SREC not the macrophages of the reticuloendothelial system, are primarily responsible for the removal of these modified lipoproteins from the circulation in vivo. For this reason, the SREC receptor and the LOX-1 receptors are preferred for use in transfecting tumor cells tumor endothelium in vivo.

[0543] Polypeptide or naked DNA encoding receptors for LDL oxyLDL, VLDL, LRP, CD36, SREC, LOX-1 and macrophage scavenger receptor (collectively o-LDL receptors) are used individually or together with SAg polypeptidee or naked DNA containing the CpG backbone are prepared as in Examples 1, 2, 3, 30-31. Alternatively, SAg are incorporated or bound or conjugated to vesicular or exosomal structures shed from cells expressing the LDL, oxy LDL receptors. Superantigens are also incorporated into liposomal structures which express natural or synthetic LDL, oxyLDL receptors as described in Section 45 and Examples 3, 5, 6, 36, 42. All ot these constructs are administered in vivo by any route but preferably by intratumoral injection as in Examples 2, 6, 14, 30-31. Once localized, and expressing o-LDL receptor(s) in tumor sites in vivo, lipoprotein preparation(s) containing their respective ligands are administered to the host. These LDL, oxyLDL or lipoproteins are non toxic to the host generally but upon binding to a dense populaton of receptors in the tumor induce apoptosis of tumor cells and endothelial cells expressing the receptors and initiate a well localized anti-tumor response. The presence of the SAg at the same site amplifies the immune and inflammatory anti-tumor effect. The advantage of this system is the minimal toxicity to the host since the o-LDL receptors are of host origin and the lipid infusions consist of substances which are indigenous to the host. These constructs are useful in vivo against primary or metastatic tumors according to Examples 14, 15, 16, 18-23.

[0544] 50. SAg Inserted into Oncolytic Viral Vectors: SAg-Viral Antigen Nucleotides & Fusion Proteins and Conjugates

[0545] SAgs and IHPV-E6 or 7 polypeptides are chemically conjugated by methods given in Examples 3. Alternatively, the naked nucleotides comprising SAgs (with immunostimulatory sequences) and the HPV-E6 or E7 are prepared as chimeric nucleotides or proteins by methods given in Examples 5, 30, 31-60. The SAg nucleic acids are inserted into several sites in lytic and oncogenic viruses. For example, in HPV, the SAg nucleotide is substituted for a minimally functional domain such as viral capsid nucleotides whereas in adenoviruses, SAg is substituted for the E1 or E3 nucleotides as in Example 60 These constructs are transfected into tumor cells in vivo. Since HPV is not a good vector the SAg-HPV E6 or E7 chimeric plasmid is introduced preferentially into vaccinia virus for purposes of transfection. In tumor cells, the HPV E6 protein triggers the inactivation of P53 via the ubiquitin pathway favoring the proliferation of virus and eventual tumor cell oncolysis. With viral oncolysis, the SAg nucleic acids and transcibed polypeptide are shed and the virus (and SAg nucleotides) then infect new tumor cells while the shed SAg polypeptide induces a T cell tumor inflammatory response. Preparation of the SAg-viral constructs is given in Example 60. Chimeric plasmids are prepared consisting the SAg fused to viral epitope known to be immunogenic. An example of this construct is SAg-E6 or E7 construct as given in Example 60. The SAg-HPV E6 or E7 chimeric gene is transfected into tumor cells as given in Examples 1 and 60. The SAg-HPV-E6 or E7 chimeric gene, tumor cells transfected with and expressing SAg and HPV-E6 or E7 epitopes, polypeptide conjugates or fusion proteins comprising SAgs and HPV-E6 or E7 or are used as preventative or therapeutic vaccines under protocols given in Examples 14, 15, 16, 18-23, 30, 31, 60.

[0546] Dendritic cell are exposed to SAg and HPV-E6 or E7 transfected tumor cells which have undergone necrosis by methods including but not limited to several cycles of freezing and thawing (Sauter B et al., J. Exp. Med. 191: 423-433 (2000)). The dendritic cells ingest the necrotic tumor cell transfectants. In the dendritic cells, the viral antigens undergo cross priming to the class I pathway. These primed dendritic cells are then harvested and administered to the tumor bearing host as given in Examples 26-28, 60. They are also used to senstize T cells ex vivo.

[0547] In another embodiment, the DNA and RNA from these SAg-HPV-E6 or E7 transfected tumor cells or dendritic cells are extracted and utilized for in vivo therapy as in Examples 30-34, 60. While the HPV-E7 exemplified herein is a viral immunogen, the method is applicable to any other immunogenic viral constituent associated or etiopathogenic in the malignant process. Non-viral tumor associated antigens given in Rosenberg S A Cancer: Principles and Applications of Biologic Therapy in Principles & Practice of Oncology sixth edition edited by V T DeVita, S Hellman, S A Rosenberg, J. B Lippincott Co., Philadelphia 1999); Ostrand-Rosenberg S Immunologic Targets of Gene Therapy of Cancer in Gene Therapy of Cancer edited by E C Lattime, S L Gerson pp. 33-44 Academic Press San Diego, Calif. 1999; Schreiber H Tumor Immunology in Fundamental Immunology edited by W E Paul, Raven Press, New York, 1993 are also useful. The viruses include but are not limited to adenovirus, EB virus, herpesvirus, hepatitis B, cytomegalovirus and Kaposi's sarcoma. DNA vectors encoding SAg and other viral or non viral tumor associated antigens are also functionally enhanced in producing an antitumor effect by the inclusion of immunostimulatory sequences, optimal promoters, introns, and polyadenylation signals. (Donnelly J J et al., Annu. Rev. Immunol. 15: 617-648 (1997).

[0548] Selectivity of SAg-Viral Nucleotides for Tumor Cells

[0549] Maximum selectivity of the viral-SAg construct for tumor tissue in vivo is achieved by increasing the expression of genes necessary for replication in tumor cells or by decreasing expression of such genes in normal cells. Approaches to express genes necessary for replication only in specific tissues are used. Tumor-specific viral-SAg gene expression is accomplished through the use of tissue-specific promoters. Such promoters are activated preferentially in the tissue of tumor origin. Tumors arising from nonvital organs are amenable to this approach (e.g., prostate cancer or melanoma). Tissue-specific gene expression is achieved using adenovirus and retroviral vectors. The adenoviral E1B promoter is replaced with albumin or immunoglobulin promoters, resulting in liver- or myeloma-specific E1B mRNA transcription, respectively. The E1A enhancer markedly increases transcription from the albumin promoter, particularly in the presence of the E1A protein. The prostate-specific promoter and the alphafetoprotein promoter are exchanged with the E1A promoter to achieve enhanced replication in cells from the prostate (cancer and normal cells) and in hepatocellular carcinomas, respectively. In one embodiment, the SAg nucleotide is introduced into the above adenoviral constructs preferably at non functional sites as given in Example 60. The viral construct exhibits specificity for tumor cells and induces oncolysis. SAg expressed on the tumor cells induces a T cell inflammatory response. SAg polypeptide is also produced by the SAg-viral transfected bystander tumor cells that are infected with the SAg-viral construct and induces a potent inflammatory T cell tumoricidal response.

[0550] The preferred virus for insertion of the SAg nucleotide is an attenuated adenovirus dl1520 that lacks the 827-base pair which encodes a 55-kilodalton E1B-55-kDa protein that inactivates P53. The binding of E1B to p53 is necessary for efficient replication in normal cells. However, E1B-55-kDa is dispensable in tumor cells lacking functional P53. Indeed, P53 function is lost in over 50 percent of all human cancers. Similarly, the deletion of specific RB-binding sites in the E1A protein leads to selective replication in cancer cells with abnormalities in the RB pathway and in proliferating normal cells. Such attenuation of viruses potentially decrease replication in tumor cells. Replication competence is better maintained by selectively mutating the gene rather than deleting it completely. For example, second generation adenovirus E1B-55-kDa gene mutants still lack p53-binding but retain the viral mRNA transport function (which is lost with the total E1B-55-kDa gene deletion); these viruses replicate more efficiently in p53-deficient cells than do mutants completely lacking the 55-kDa gene. SAg nucleotide is inserted into the dl1520 as given in Example 60. SAg protein is produced by the transfected tumor cell or by bystander tumor cells that are infected by the dl1150-SAg after viral-induced oncolysis. The SAg induces a potent T cell tumoricidal inflammatory response.

[0551] Another additional approach to abrogating replication in normal cells, but not in tumor cells, is to delete/mutate genes necessary for replication in normal cells that are dispensible in tumor cells. For example, HSV-1 ribonucleotide reductase and thymidine kinase are essential for viral DNA synthesis in quiescent cells, whereas in rapidly proliferating cells these enzymes are not necessary. In a clinical situation such as primary brain cancer the tumor cells are susceptible to replication and lysis by such deletion mutants. In contrast, the surrounding neurons are quiescent and resistant to viral replication. This approach results in a proliferating-cell-specific, and not a cancer-specific, therapeutic agent. Nucleic acids encoing SAg are inserted into the HSV deletion mutants. SAg protein is produced by the transfected tumor cell or by bystander tumor cells that are infected by the SAg-HSV deletion mutants after viral-induced oncolysis. The SAg induces a potent T cell tumoricidal inflammatory response.

[0552] A class of negative selectable markers includes genes whose enzyme protein products convert a prodrug into its toxic form. This class is termed suicide genes. Genetic modification of tumor cells with the herpes simplex virus thymidine kinase gene (HSV-TK) results in killing of the gene-modified tumor cells by the antiviral drug ganciclovir (GCV). GCV is a derivative of acyclovir, which are nucleoside analogs that can be phosphorylated by the viral thymidine kinase gene into a monophosphate form. Normal cellular enzymes can then di- and triphosphorylate the monophosphate form into a toxic drug, which functions as a DNA chain terminator and an inhibitor of the viral DNA polymerase. The HSV-TK enzyme is almost 1,000-fold more efficient at monophosphorylating GCV than is the cellular thymidine kinase. Thus, GCV is virtually nontoxic to uninfected cells at therapeutic concentrations of the drug (1-10 μM). Because the toxic metabolite of GCV is phosphorylated, its ability to cross cell membranes is impaired and thus its half-life within the cell is six times longer (18-24 hours) than that of unmodified GCV. The increased cellular half life of the phosphorylated CCV is an important feature of the anticancer effects of HSV-TK-gene-modified tumors.

[0553] An important feature of the tumoricidal response induced by suicide genes is that as few as 10% of the cells in a tumor containing the HSV-TK-gene-modified cells are sufficient to kill the entire tumor population. In addition long-term gene expression is not required because tumor cells expressing the HSV-TK suicide gene are killed after only a short exposure to GCV undergoing apoptotic or programmed cell death initiated by the triphosphorylated toxic drug metabolite.

[0554] In this embodiment, the SAg nucleic acids are cotransfected into tumor cell together or fused to the HSV-TK gene with the HSV-TK gene after which GCV is introduced. The SAg gene is unaffected by GCV. Expression of SAg nucleotides and polypeptides released from tumor cells undergoing viral oncolysis enhances the the primary tumor killing and the bystander effect of the suicide genes, by inducing a T cell inflammatory tumoricidal response.

[0555] Other viruses with specificity for tumor cells, proliferating cells, ras or ras pathway activation or p53 mutations in which SAg nucleic acids are inserted include autonomous parvoviruses, reoviruses and Herpes simplex virus-1. Adenovirus (serotype 5) which is selective for malignant protate cells due to E1A expression driven by a PSE element and adenovirus (2/5 chimera) which is avid for cells lacking p53 function due to a E1B-55 kD gene deletion and insertion of HSV-tk/CD fusion are also be used as vectors for superantigen nucleic acids and targeting superantigens selectively to tumor sites.

[0556] Replication-selective adenoviruses mediate anti-tumor effects in variety of ways and are ideal vectors and devices for targeting superantigen nucleic acids to tumor in vivo. Adenoviruses exert direct tumor cytotoxicity modulated by E3 11.6 kD and EORF4. They augment anti-tumor immunity via CTL infiltration and direct killing (modulated by E3gp19 kD), antigen release (modulated by E3 11.6 kD), augment immunostimulatory cytokine induction and increase anti-tumor cytokines (e.g., TNF, modulated by E3 10.4/14.5, 14.7 kD), enhance sensitivity to cytokines (e.g., TNF, modulated by E1A), and increase sensitization to chemotherapy. Superantigen nucleic acids are integrated into the genome of any of the adenoviruses with the above properties and administered parenterally, intratumorally or intrathecally to tumor bearing hosts. The superantigen nucleic acids are targeted to tumor sites where they transfect tumor cells or non-tumor cells in the vicinity of the tumor resulting in the expression of superantigen polypeptide. In this way a T cell inflammatory tumoricical effect is therefore induced localized selectively to the tumor sites.

[0557] In another embodiment, SAg nucleic acids are also inserted into a viral vector which contains a site of expression or overexpression of a host tumor associated antigen. Nucleotides encoding tumor associated antigens (TAAs) such as immunodominant Mart-1, tyrosinase or Mage are preferred although any TAA nucleotide are used. These viral vector with sequences encoding SAg and tumor associated antigen retain their specificity for tumor cells by incorporating a tissue or tumor specific promoter or driver encoding a key protein or transcription factor such as prostate specific antigen, human kallikrein promoter or alphafetoprotein or host tumor suppressor binding protein. The examples of nucleic acids encoding SAg expressed a HPV E6 or E7 or prostate specific antigen plasmid are given above.

[0558] These SAg-viral constructs given above are transfected into tumor cells in vivo. They are given directly into tumor tissue or injected parenterally (intramuscularly, subcutaneously, intrathecally, intraperitoneally or intravenously) where because of their selectivity for tumor or proliferating tissue will localize in tumors. In another embodiment, SAg-viral naked DNA constructs are administered as a vaccine parenterally (intramuscularly, subcutaneously, intrathecally, intraperitoneally or intravenously) or directly into tumor cells in vivo. Peptide or polypeptide conjugates, fusion proteins comprising SAg linked to viral epitopes and/or tumor antigens are also useful, e.g., HPV E6 and E7. These constructs are are used as a preventative vaccines or against established tumors under protocols given in Examples 60.

[0559] Plasmid DNA and RNA Vectors for Production of Superantigens

[0560] To increase the potency of candidate nucleic acid vaccines, a self-replicating nucleic acid vaccine is created. The alphaviruses, accomplish self-replication through the action of a polyprotein called RNA replicase, that is encoded within a single open reading frame. Members of the Alphavirus genus include Sindbis virus, Semliki Forest Virus (SFV) and Venezuelan equine encephalitis (VEE). Alphaviruses contain a single strand of RNA that are directly translated by ribosomes (because of its positive polarity) producing the replicase polyprotein. This polyprotein is cleaved into four subunits that can then drive not only its own replication, but the replication of a structural protein that comprises the viral coat. Theoretically up to 200,000 copies of the RNAs and 100,000,000 molecules of heterologous proteins are made in a single cell.

[0561] The activity of a replicase-containing RNA vaccine is exemplified in various engineered DNA plasmids which are transcribed and capped in vitro. A single injection of as little as 0.1 ug the self-replicating RNA encoding a model tumor antigen, β3-galactosidase (p-gal), is sufficient to elicit antigen-specific antibody and cytotoxic T lymphocyte responses. As little as 1 ug of the self-replicating RNA consistently achieves complete protection from challenge with the β-gal-expressing CT26.CL25 tumor cell line. The replicase-based RNA vaccine is therapeutically effective in mice bearing tumors injected intravenously two days before the initiation of treatment. Tumor-bearing mice immunized with self-replicating RNA had significantly lower numbers of metastases and survived on the average 10-20 days longer than mice treated with non-replicating RNA. In addition, a several log enhancement of immunogenicity of the self-replicating vector was not merely due to enhanced production of antigen by the self-replicating RNA immunogens but rather to the induction of apoptosis by double-stranded RNA intermediates. The self-replicating RNA enhances the presentation of antigen by dendritic cells which occurs because of increased antigen uptake of cells that die apoptotically as a result of the activity of the self-replicating vector. Furthermore, double-stranded RNA intermediates formed during RNA replication induce maturation and activation of dendritic cells, either directly, or through the elaboration of local “danger signals”. DNA plasmids using a CMV promoter which can also generate a long positive strand of RNA (replicon) encoding a SAg which like the alphavrial genome itself is then capable of self replication are also useful. Similarly, any RNA or DNA vectors carrying nucleic acids encoding SAg which are enhanced by optimizing promoters, introns, and polyadenylation signals are useful (Donnelly, J J et al. Annu. Rev. Immunol. 15: 617-648 (1997); Leitner W W et al., Cancer Res. 60: 51-55 (2000)). In this embodiment, SAg is substituted for the LacZ to produce the pRep-SEB as given in Example 60. The pRep-SEB is used as a preventative vaccine and against established tumor as given in Example 60. There are used as preventative vaccines or against established tumor as given in Examples 60.

[0562] Tumor Cells Transfected with SAg & SAg-Viral Constructs Induce Tumor Necrosis & Enhance Tumor Antigen Presentation by Dendritic Cells

[0563] SAgs are capable of inducing an necrotizing tumoricidal response associated with generation of cytotoxic T cells and inflammatory cytokines (Dow S W et al., J. Clin. Invest. 101: 2406-2424 (1998 ). Tumor cells transfected with SAg-viral constructs undergo oncolysis. The SAg expressed in the construct induces a necrotizing tumoricidal response. Dendritic cells process the necrotic tumor cells to induce a T cell tumoricidal effect. Macrophages phagocytosing the SAg-viral transfected tumor cells are activated to become tumoricidal. When SAg-viral transfected tumor cells are exposed to exogenous apoptotic stimulus such as chemotherapy or radiation, the apoptotic tumor cells release SAg nucleotides and polypeptides together with intact virus The released virus spreads to infect neighboring tumor cells while the SAg polypeptide released from the lysed tumor cells produces a T cell inflammatory tumoricidal response accompanied by activation of tumoricidal macrophages.

[0564] Tumor cells transfected with the SAg-viral constucts express both viral and SAg epitopes. In the case of HPV, E6 or E7 epitopes are tumor specific antigens. Exposure to SAg together with viral antigen increases the immunogenicity of viral antigens by activating viral specific cytolytic CD8+ cells (Coppola M A et al., Int. Immunol. 9: 1393-1403 (1997). Hence, viral (tumor specific) epitopes coexpressed on tumor cells and presented with superantigen polypeptide produces an enhanced anti-viral response directed to viral epitopes expressed on the transfected tumor cells.

[0565] Dendritic cells ingesting apoptotic or necrotic tumor cells containing SAg-viral nulceotides, transcribe, express and present SAg and to T cells which are activated produce a tumoricidal response. T cells are also exposed in vitro to dendritic cells expressing SAg and viral epitopes from ingested apoptotic or necrotic tumor cells in vitro. These tumor sensitized and SAg activated T cells are used for adoptive immuntherapy of cancer as given in Examples 60.

[0566] The DNA and RNA from tumor cells transfected with nucleic acids encoding SAg and viral epitopes, or dendritic cells after ingestion of SAg transfected tumor cells are extracted and used as naked DNA constructs for in vivo cancer therapy as in Examples 30-34, 60. While the viral epitopes HPV-E-6 and E7 are exemplified herein, the method is applicable to other viral epitopes which are known to be associated or etiopathogenic in the malignant state including but not limited to adenovirus, EB virus, herpesvirus, hepatitis B, cytomegalovirus and Kaposi's sarcoma epitopes.

[0567] Adenovirus Containing Superantigen Linked to Modified Form of IkBa

[0568] The superantigen gene is linked the gene expressing a modified form of IkBa and inserted into a viral vector such as adenovirus, vaccinia or any of the well established viral vectors well known in the art and transfected into tumor cells. The modification of IkBa blocks its ability to be phosphorylated and to be subsequently degraded, thereby preventing NFkB activation and translocation to the nucleus. In the absence of NRkB activation exogenous TNFα induces apoptosis in the IkBa treated tumor cells. The virus also induces lysis of the tumor cells and concurrently release of the SAg polypeptides and nucleic acids from tumor cells activates tumoricidal macrophages, induces a necrotizing inflammatory response which stimulates a T cell tumoricidal response.

[0569] SAg-viral constructs are prepared by methods given in Example 60. The SAg-viral constructs are administered intratumorally or parenterally in the tumor models as given in Examples 60.

[0570] 51. Augmented Immune Response to Cancer and Infectious Diseases

[0571] Deletion/Inactivation of Immunocyte Inhibitory Receptors and Receptor Tyrosine Based Inhibitory Motifs (ITIMs)

[0572] Many lipid-based tumor associated antigens (collectively Lip-TAAs) consist of lipids, glycolipids, gangliosides, sphingolipids and lipopeptides, all of which are weak immunogens and fail to evoke effective tumoricidal immune responses. The same may be said of lipid based antigens associated with infectious organisms. For example, tumor gangliosides on the surface or shed from tumor cells actually suppress T cell and antigen presenting or accessory cell function. The present invention provides an approach directed at inhibitory receptors (IRs) and their inhibitory motifs, described below, which recognize (1) Lip-TAAs, (2) lipid-based infectious disease associated antigens (Lip-IDAs) and (3) superantigens (SAgs) or self molecules associated with superantigens (“SagSMs”). Deletion or inactivation of these IRs or their inhibitory motifs by pharmacologic or genetic means results in an enhanced cellular response to tumors or infectious organisms. The IRs specific for Lip-TAAs, Lip-IDAs and SAgSM are abbreviated, respectively, IR_{TAA}, IR_{IDA} and IR_{SAg}.

[0573] Lipid antigens are presented to cells of the immune system in the context of their natural antigen-presenting receptors, such as CD1 or attached to lipoproteins. The present invention is designed to deactivate or eliminate the inhibitor receptors (IR_{TAA}, IR_{IDA} and IR_{SAg}) on T cells, NK cells and NKT cells, all of which inhibit responses to lipid antigens presented in the context of CD1 or a suitable surrogate, prior to exposure of these cells to a specific Lip-TAA, Lip-IDA or SAgSM. The IRs recognize and respond to the same Lip-TAAs+self (e.g., CD1 or MHC) as do activation receptors with, among other consequences, an inhibitory signal to the activation receptor after activation receptor engagement by its ligand. The cell populations bearing such IRs include but are not limited to T cells, NK cells and NKT cells. Antigen presenting or accessory cells (APCS) including but not limited to macrophages, dendritic cells and fibroblasts also express IR_{TAA}, IR_{IDA}.

[0574] After exposure to Lip-TAAs, a responding cell such as a T cell, NK cell or NKT cell devoid of an IR_{TAA} becomes tumoricidally activated due to the unopposed stimulation of activation receptors. This is particularly advantageous when the stimulus is a weakly immunogenic Lip-TAA which binds to IRs. Similarly after exposure of APCs to Lip-TAAs, a responding cell devoid of an IR_{TAA} becomes capable of processing, expressing and presenting LipTAAs (and in the case of macrophages become tumoricidally activated) due to the unopposed stimulation of activation receptors to LipTAAs. Likewise, after exposure to Lip-IDAs, responding T cells, NK cells or NKT cells devoid of IR_{IDA}s become cytolytic for (or otherwise destructive of) the infectious organism bearing the Lip-IDA. Similarly, if a Lip-TAA or Lip-IDA are physically associated, for example, genetically fused or chemically conjugated, to a SAgSM, after exposure to a combination of the SAgSM and the Lip-TAA or Lip-IDA, responding cells lacking the IR_{SAg} (and lacking IR_{TAA} or IR_{IDA}) become hyperresponsive to these antigens.

[0575] Inhibitory Receptors (IRs) and Their Motifs

[0576] Most of the IRs are members of one of two protein families: (1) Type I integral membrane proteins belonging to the Ig superfamily, and (2) Type II integral membrane proteins of the C type lectin superfamily, expressed as disulfide linked homodimers or heterodimers. These IRs are inert when self-aggregated but are able to abolish cellular signaling when co-ligated to activation receptors. Their cytoplasmic domains contain one or more motifs termed “immunoreceptor tyrosine-based inhibition motifs” or ITIMs, defined by the six-amino acid sequence (SEQ ID NO:46) (ILV)xYxx(LV) (where x is any amino acid). ITIM sequences are phosphorylated upon receptor co-ligation to create a binding site for cytoplasmic factors with SH2 domains that can transmit the inhibitory signal intracellularly. When phosphorylated, IRs recruit one or more types of tyrosine phosphatases, such as SHP-1, which dephosphorylates molecules in the activation cascade. All the identified families of IRs with specificity for MHC class I molecules have ITIM sequences in their cytoplasmic tails.

[0577] ITIM Sequences in Their Cytoplasmic Tails

[0578] For each IR, there exists a counterpart activating receptor with a highly homologous extracellular domain and a short cytoplasmic tail that lacks signaling capacity. The transmembrane domains of these activation receptors are characterized by the presence of a charged amino acid, a hallmark of receptors that associate with accessory subunits containing the immunoreceptor tyrosine-based activation motif (ITAM). ITIM-bearing receptors commonly inhibit activating signals triggered by receptors with an ITAM in their cytoplasmic tails, for example, B cell Ig receptors, TCRs, and Fc receptors (FcRs).

[0579] Cell activation mediated by ITAM-containing receptors involves phosphorylation and activation of several tyrosine kinases and subsequent activation of phospholipase Cγ (PLCγ) and phosphatidylinositol 3-kinase (PI3-K), together leading to the production of phosphoimositol messengers and a mobilization of intracellular Ca²⁺ and a sustained increase in cytoplasmic Ca²⁺ levels. Engagement of an IR has a dominant effect, blocking the activation of an activation receptor. In the immune system, this has effects of blocking of cytotoxicity (by T, NK and NKT cells) and cytokine production. IRs use two different pathways to terminate cell activation depending on the type of molecule that is recruited to the phosphorylated ITIM sequences:

[0580] (1) protein dephosphorylation mediated by tyrosine phosphatases, including SHP-1 and SHP-2, which abrogate the most proximal events in the activation cascade resulting in the abolition of Ca²⁺ mobilization and

[0581] (2) an inhibitory signal is generated via phosphoinositol phosphatase SHIP which hydrolyzes phosphoinositol messengers.

[0582] This latter signal does not affect proximal events triggered by the activating receptor, such as the activation of kinases, receptor phosphorylation, or Ca²⁺ release from intracellular stores. Rather, it specifically impedes extracellular Ca²⁺ influx and therefore blocks a sustained increase in cytoplasmc Ca²⁺.

[0583] SHP-1, SHP-2 and SHIP, recruited by IRs, are associated with antigen-binding receptors, Fc receptors, growth factor and cytokine receptors, and their loss, deficiency or absence results in augmented cell activation and proliferation. These phosphatases do not function through recruitment to IRs, but rather via association with stimulatory receptors to set thresholds or to prevent unsolicited cell activation. The dissociation of an antigen from molecules recruited by SHP-1, SHP-2 and SHIP would abort an a negative signal and augment cell reactivity, in particular to antigens of tumors and infectious organisms as well as to SAgs.

[0584] Augmented Immune Response to Tumors and Infectious Agents

[0585] Dual Inactivation or Deletion of IR_{TAA}s or IR_{IDA}s and SAgSMs and their ITIMs

[0586] In the present invention, deactivation or deletion of IRs in T cells, NK cells, NKT cells or APCs is accomplished either ex vivo, in vivo or both, prior to exposure to the Lip-TAAs (Examples 51 and 52). This effect is achieved by several approaches, including, but not limited to, the use of a specific antibody or antibody fragment directed to the IR(s), gene knockout, e.g., by homologous recombination or exposure to an antisense nucleotide. Deletion of IRs leads to a significant enhancement of T cell activation in response to Lip-TAAs and SAgs. In particular, the immune cells with deleted IRs are capable of responding to subdominant and dominant Lip-TAAs on tumor cells, differentiating into effector cells such as CTL, and secreting cytokines that contribute to the tumoricidal response. The APCs deleted of IR are capable of, processing and presenting Lip-TAAs (expressed on or shed by tumor cells) to immune cells such as T cells, NK cells or NKT cells. Macrophages deleted of IRs become tumoricidally activated.

[0587] When stimulated, the IR_{TAA}, IR_{IDA}, IR_{SAg} and their respective ITIMs inhibit cellular activation by the activation receptors that are specific for Lip-TAAs. The IR_{TAA}s and IR_{IDA}s on α/β TCR-bearing T cells confer specificity, respectively, for Lip-TAAs and Lip-IDAs (for inhibitory signalling), optionally in the context of a CD1 or a CD1 isoform. Sequence analysis of a panel of CD1-restricted, lipid-specific inhibitory TCRs on TCR positive cells reveals the incorporation of template-independent N nucleotides that encode diverse sequences and frequent charged basic residues at the V(D)J junctions. The TCR CDR3 loops containing charged residues project between the CD1 α-helices, contacting the lipid antigen hydrophilic head moieties as well as adjacent CD1 residues in a manner that explains antigen specificity and CD1 restriction.

[0588] The IR_{TAA}s respond specifically to Lip-TAAs, including fatty acids, ceramides, glycolipids, sphingolipids, glycosphingolipids, phosphosphingolipids, gangliosides, sialylated glycans and lipopeptides. IR_{TAA}s also recognize sialic acid and carbohydrates in Lip-TAAs. Sialic recognition is exemplified by Siglecs (sialic acid binding lectins), carbohydrate recognition by some C type lectins both with ITIMs in their cytoplasmic tail. The sialic acid binding region of Siglecs is localized within the membrane-distal, amino-terminal domain. Each Siglec preferentially recognizes aspects of its sialylated ligands, such as the side chain, the N-acyl group, the linkage from the 2-position, and sometimes the underlying sugars Recognition involves the entire sialic acid molecule, including the carboxylate group at the 1-position, the linkage from the 2-position, the N-acyl group at the 5-position, and the exocyclic hydroxyl groups at the 7-, 8-, and 9-positions.

[0589] IR_{IDA}s recognize Lip-IDAs derived from bacteria, mycobacteria, parasites, fungi, protozoans or plants and respond by producing an inhibitory T cell response. Lip-IDAs comprise sphingolipids, glycopeptides, phytoglycolipids, mycoglycolipids, lipoarabinans, mycolic acids, Braun's lipopeptide, inositolphosphorylceramides and plant phosphatidylinositol. Sphingolipids with inositolphosphate-containing head groups showing the general structure of ceramide-P-myoinositol-X (with X referring to polar substituents), including ceramide-p-inositol-mannose, inositol-1-P-(6)mannose(α1,2inositol-1P-(1)ceramide, (inositol-P)2-ceramide, inositol-P-inositol-P-ceramide and inositol-P-inositol-P-ceramide are also useful in native form or naturally conjugated to GPI to activate T cell activation and inhibitory TCRs.

[0590] The present invention contemplates the dual deletion or inactivation, in the same cells, of the IRs along with their respective ITIMs. Deletion or inactivation of these IRs augments the cell's responses to a tumor or an infectious agents after exposure to Lip-TAAs or Lip-IDAs together with SAgSM. The lipid-based antigens are also immunogenic when conjugated or fused to SAgSM or to free SAg.

[0591] Inhibitory receptors with cytoplasmic ITIMs which would be amenable to deletion of their IRTAA and ITIMs include but are not limited to those described below.

[0592] 1. Sialic Acid Binding Lectins (Siglecs) are described in section 56.

[0593] 2. Leukocyte associated Ig-like receptor-1 (LAIR-1) (SEQ ID NO:47) is a surface molecule expressed on human mononuclear leukocytes that functions as an inhibitory receptor on human NK cells. It is also expressed on T cells, B cells, macrophages, and dendritic cells. It is a type I transmembrane glycoprotein with a single If-like domain in the extracellular region and a cytoplasmic tail containing two ITIMs. Cross-linking of LAIR-1 on NK and T cells delivers an inhibitory signal that decreases target cell lysis. Some of the family members bind MHC class I molecules or viral MHC class I homologues. This group of receptors has not been shown to have reactivity or specificity for Lip-TAAs.

[0594] 3. Killer cell inhibitory receptors (KIR) (SEQ ID NO:48) are a family of type I integral membrane protein in the Ig superfamily expressed on the surface of subsets of human NK and CD4+ and CD8+ T cells, predominantly CD28+ memory cells. They recognize to public epitopes formed by polymorphisms at the C terminal portion of a 1 helix of class I HLA-B and HLA-C alleles. Upon binding to HLA class I molecules KIRs prevent activation of NK cells. KIR binding to polymorphic HLA-B and HLA-C inhibits production during SAg T cell stimulation (IR_{SAg}s) diminshes the production of SAg-induced effector T cells.

[0595] Each KIR of the Ig superfamily has two ITIM sequences (YxxL) separated by a stretch of about 26-28 amino acids. These ITIM motifs (discussed above) are critical for the inhibitory signals generated upon binding to a class I ligand. These KIRs generate a negative signal by recruiting and activating two protein tyrosine phosphatases containing a Src homology region 2 (SH2) domain, SHP-1 and SHP-2. (Whereas the KIR inhibitory signal utilizes SHP-1, the signal of another IR, FcγRII, depends on the phosphoinositol phosphatase SHIP). These tyrosine phosphatases dephosphorylate molecules in the activation cascade and thereby counter the stimulatory effects of the tyrosine kinases associated with activation pathways. SHP-1 binds preferentially to the sequence VxYxxL. The more N-terminal ITIM (SEQ ID NO:165) (VTYAQL) binds to both SH2 domains of SHP-1, and does so more avidly than does the C-terminal ITIM (SEQ ID NO:166) (IVYELL). The N-terminal ITIM appears to be sufficient for the inhibitory signal.

[0596] 4. Dendritic cell immunoreceptor (DCIR) (SEQ ID NO:49) is a type II membrane glycoprotein with a single carbohydrate recognition domain(CRD). It contains ITIMs in their cytoplasmic tails. DCIRs are strongly expressed on dendritic cells, monocytes, macrophages, B lymphocytes, and granulocytes but not on NK or T cells. These receptors do not recognize gangliosides or sialylated glycans.

[0597] Engagement of the IR has a dominant effect, blocking activation. KIRs inhibit the lytic function of CTLs activated by bacterial SAgs and regulate other T cell responses. Hence, one consequence of disrupted KIR recognition of self-class I molecules is increased T cell cytokine production in response to SAg stimulation.

[0598] 5. Immunoglobulin-like transcripts (ILTs) (SEO ID NO:50) are closely related to KIRS, bind MHC class I molecules and also contain ITIM sequences in their cytoplasmic tails. Neither KIRs nor ILTs have been shown to have reactivity or specificity for Lip-TAAs.

[0599] In one embodiment, this invention provides a population of immunocytes and APCs that are hyperresponsive to Lip-TAA and SAgs. These cells have been modified by functionally inactivating ITIMs (or the SH-2- or SHIP-binding sites thereof) in IR_{TAA}. IR_{IDA} and IR_{SAg} using (a) pharmacologic agents, (b) specific (intracellular) antibodies and (c) gene knockouts.

[0600] In another embodiment, the IRs are deleted or inactivated in vivo or ex vivo before exposing the cells to Lip-TAAs or SAgs by providing an antisense molecule which inactivates the relevant inhibitory ITIM or related signaling sequences. Cells treated in this way will then be activated in vivo when exposed to (1) Lip-TAA expressed endogenously on tumor cells or as exogenous purified Lip-TAA preparations; (2) Lip-IDAs derived from infectious agents and expressed endogenously on the organisms or as exogenous purified Lip-IDA preparations; or (3) SAg. Lip-TAAs, Lip-IDAs or SAgSM are thus used in vivo as preventive vaccines or as therapeutic agents in the treatment of established cancer or infectious disease (Example 54). Alternatively, IR_{TAA}s, IR_{IDA}s, IR_{SAg}s or their respective ITIMs on cells of the immune system (including T cells, NK cells, NKT cells) and antigen presenting cells (including macrophages, dendritic cells, fibroblasts) are deleted or inactivated ex vivo using methods described in Examples 51 and 52. Thereafter, these cells are exposed to Lip-TAAs, Lip-IDAs or SAgSM as in Examples 53 and 54. When it is desired to augment immune responsiveness to Lip-TAA or Lip-IDAs and SAgSM, cells are exposed to those molecules simultaneously or sequentially as described in Example 54.

[0601] Deleterious side effects such as uncontrolled T cell activation and autoimmune responses by cells depleted of their IRs in vivo are prevented or minimized by ex vivo transduction of cells having the deactivated or deleted IRs with the HSV thymidine kinase gene. Such transduced cells become susceptible to killing by ganciclovir in vivo as described in Example 56, providing a “suicide” type mechanism to control these cells' actions.

[0602] Any IR_{TAA}, IR_{IDA}, IR_{SAg} can be inactivated or deleted (by the methods of Examples 51 and 52) regardless of whether it is a member of one or another recognized or new receptor superfamily or subfamily, as long as the IR retain its functional properties and results in augmented responses to Lip-TAAs, Lip-IDAs and SAgSM (Examples 53, 54).

[0603] 52. Deletion of Lip-TAA, Lip-IDA & SAgSM Motifs which Selectively Bind and Activate IR_{TAA}s, IR_{IDA}s and IR_{SAg}s

[0604] The structural motifs in the Lip-TAA, Lip-IDA and SAgSM molecules which are responsible for selective binding to IR_{TAA}s, IR_{IDA}s and IR_{SAg}s and for generating an inhibitory signal, termed “antagonist motifs,” are deleted from the Lip-TAA, Lip-IDA and SAgSM molecules. In this way, the remaining agonist motifs selectively bind and stimulate the activating receptors (e.g., via activity at their ITAMs) without activating the dominant IRs or their ITIMs. This results in enhanced signaling and activation of the immune cell population in response to weakly immunogenic Lip-TAAs, Lip-IDAs and SagSM ( as well as with free SAgs.

[0605] In another embodiment, the approach of the present invention is to functionally inactivate, in a reversible manner, the molecules in the enzymatic pathway that produce activation of the IR following exposure to Lip-TAAs, Lip-IDAs or SAg, preferably the various phosphatases described above. This can be accomplished using intracellular antibodies. In another embodiment, these molecules are deleted (e.g., by gene knockout). This leads to unopposed signaling by the activation receptor and cellular hyperresponsiveness to the lipid-based antigens, SAgSM or SAg.

[0606] In another embodiment, the functional sites on the ITAM sequence of the activating receptor (which are modulated by ITIM-mediated effects) are blocked or inactivated pharmacologically, e.g., using intracellular antibodies or antisense oligonucleotides, or are genetically deleted (ITAM knockouts) as described in Examples 51-52.

[0607] 53. Deletion of Nucleic Acids Encoding IR_{TAA}s, IR_{IDA}s, IR_{SAg}s, their ITIMs or Fas Genes

[0608] The present invention provides a cell of the immune system or an accessory cell depleted not only of IR_{TAA}s, IR_{IDA}s, IR_{SAg}s but also devoid of Fas receptors. Such a cell is (a) hyperresponsive to Lip-TAAs, Lip-IDAs and SAgSM or free SAgs, and (b) resistant to apoptotic signals from tumor cells that secrete Fas ligand. Therefore, when administered to a subject, these cells manifest their tumoricidal properties even while penetrating tumor tissue without being subject to apoptosis induced by the high local concentration of Fas ligand secreted by the tumor cells. The deletion or functional inactivation of the Fas gene in cells of the immune system, including T cells, NK cells and NKT cells, is accomplished ex vivo by homologous recombination or using antisense oligonucleotides (Examples 51 and 52). These apoptosis-resistant, hyperresponsive cells are useful for adoptive immunotherapy of cancer (Examples 2-5, 7, 15, 16 18-23, 54).

[0609] 54. Genes Encoding IR_{TAA}, IR_{IDA}, IT_{SAg}, ITIMs and ITAMs

[0610] Genes encoding the IRs and their ITIMs are cloned using conventional techniques. Their size and chromosomal location are determined using well established methods. It is predicted that the ITIMs represent no more than about a 40 base pair segment. In the present invention, genes encoding IR_{TAA}s, IR_{IDA}s, IR_{SAg}s and their ITIMs including but not limited to ITIM sequences in Siglecs, LAIRs, KIRs, DCIRs, ILTs are deleted or inactivated in immunocytes and APCs in vivo or ex vivo by the methods of Examples 51 and 52. These cells are then exposed to Lip-TAAs, Lip-IDAs and SAgSM or free SAgs in vivo or ex vivo (Example 53, 54). The ex vivo treated immune system cells are used for adoptive immunotherapy of cancer and infectious disease (Examples 2-5, 7, 15, 16 18-23, 53, 54).

[0611] 55. Therapeutic Composition: SAg or SAgSM Conjugated to Lip-TAAs and Lip-IDAs

[0612] In one embodiment, SAgs are chemically conjugated to Lip-TAAs (of the types listed above). In another embodiment, SAgs are conjugated to Lip-IDAs such as glycans and peptidoglycan antigens derived from bacteria, mycobacteria, parasites, fungi or plants. These families are listed above. These lipid based molecules also include sphingolipids with inositolphosphate-containing head groups as listed above. These molecules are used in native form or may be conjugated to GPI structures. They may be obtained by isolation from shed membranes, exosomes, or vesicles of the native organism. Example 55 describes extraction and purification of these lipids. SAg-Lip-TAA or SAg-Lip-IDA conjugates are prepared by methods of Examples 4-5. For immunization, these conjugates may be used alone or loaded onto soluble CD1 receptors or onto the surface of APCs (Example 5). Example 5 also describes these conjugates with attached GPI, fused to cell membranes, for example, tumor cell or erythrocyte membranes. In this form, the conjugates are used to activate T cells, NKT cells or NK cells.

[0613] These conjugates are used in vivo as therapeutic antitumor vaccines according to Examples 14, 15, 16, 18-23. They are also useful ex vivo for producing a population tumoricidal T cells, NK cells or NKT cells for adoptive immunotherapy of cancer (Examples 2-5, 7, 15, 16, 18-23). They are used ex vivo to activate cells in which IR_{TAA}, IR_{IDA} or IR_{SAg} have been deleted (such as by gene knockout) or functionally deactivated (e.g., antisense-treated). (See Example 53, 54). These hyperresponsive immune cells are then infused into the subject using protocols set forth in Examples 15, 16, 21, 23, 53, 54.

[0614] Conjugates between SAg and a Lip-IDA derived from a fungal, parasitic or mycobacterial sources are also used for the treatment of infectious diseases such as tuberculosis, leishmaniasis, trypanosomiasis as disclosed in Example 53. They are also useful ex vivo for activating a population of cells in which IR_{IDAs} specific for bacterial, fungal, parasitic or mycobacterial antigens have been (1) deleted (via gene knockout) or (2) functionally inactivated (via antisense) for use in adoptive immunotherapy of infectious disease (Examples 51, 52, 53).

[0615] 56. Lip-TAA Receptors and Receptor Mimics for Binding Lip-TAAs in Tumor Bearing Hosts

[0616] Immunossuppressive Lip-TAAs

[0617] Lip-TAAs consist of sialic acid-containing glycosphingolipids, gangliosides, which are potent inhibitors of the immune response. Synthesized and shed in particularly high amounts by tumor cells, these molecules have been shown to enhance tumor formation and progression in vivo. In the tumor cell microenvironment and ultimately in the circulation associated with low density lipoprotein molecules, tumor gangliosides are mediators of tumor-related host immune suppression. Tumor gangliosides and glycosphingolipids (LipTAAs) are known to suppress antigen or mitogen induced T or NK cell activation, cytotoxic T cell generation and monocyte accessory cell function. Indeed, tumor production and shedding gangliosides in the course of tumor growth is one explanation for the tumor antigen specific immunosuppression which appears within a few days after tumor implantation. For tumor ganglioside induced T cell inhibition, ceramides with C16-C18 fatty acyl groups are more immunosuppressive than those with longer fatty acyl chains and the presence of the the sialic acid is required.

[0618] Immunocytes

[0619] LipTAAs have also been shown to modulate expression of lymphocyte surface molecules CD2, CD3, CD4, CD5, and CD8. They interact directly with T cells to induce T cell suppression of lymphoproliferation in response to mitogen or antigen primed monocytes.

[0620] They inhibit cytotoxic effector function, trigger endocytosis of the CD4 molecule and interfere with the binding of IL-2 to its T cell receptors. Dephosphorylation of the T cell retinoblastoma protein (pRB) via phosphatase activation is an additional mechanism of the immunosuppressive effect.

[0621] Antigen Presenting Cells

[0622] LipTAAs induce a specific, non-toxic and reversible inhibition of the capacity of human monocytes to induce a MHC class II-restricted T-cell proliferative responses in vitro. This accessory cell function is a key initial step in the induction of a cellular immune response to LipTAAs. Inhibition of accessory cell function occurs after antigen processing at the step of antigen localization to the APC MHC receptor. LipTAAs inhibit the production of IL-1β, TNFα and IL-6 by stimulated adherent cells. They interfere with the expression of costimulatory molecules on antigen presenting cells; in which case tumor associcated antigens presented in the absence of costimulation induce specific T cell tolerance.

[0623] Sialic Acid Binding Ig-Superfamily Lectins (Siglecs) Receptors Homologues or Mimics

[0624] Siglecs (sialic acid binding Ig-superfamily lectins) are a multigene family of sialic acid binding proteins, each with a distinct specificity for the type of sialic acid recognized and its linkage to subterminal sugars. The family consists of sialoadhesin (siglec-1) (SEQ ID NO:51) localized to macrophages, CD22 (siglec-2) (SEQ ID NO:52) to B cells, CD33 (siglec-3) to myelomonocytic cells, myelin-associated glycoprotein or MAG(Siglec 4a)/Schwann cell myelin protein or SMP (siglec-4b) to oligodendrocytes and Schwann cells in the nervous system, Siglec-5 (SEQ ID NO:57) to neutrophils and monocytes Siglec-6/OBBP-1 to B cells and placental trophoblasts and Siglec-7 expressed in spleen, peripheral blood leukocytes and liver. Siglec-3, 5, 6, 7 bear an extracellular sialic acid binding site and an intracellular ITIMs (tyrosine-based inhibitory motif). Siglec binding sites for sialic acid are often masked by endogenous ligands and can be unmasked by transfectin of sialyltransferases, sialidase treatment or cellular activation.

[0625] Structurally, Siglecs are a group of cell surface immunoglobulin superfamily lectins and a subset of the “I” type lectins which bind sialic acid. Family members each have a single V-set NH₂-terminal Ig domain followed by a variable number of C2-set Ig domains, as many as 16 for sialoadhesin, or as few as one for CD33. The V- and adjacent C2-set domains display an unusual conserved pattern of three cysteines in each domain. These result in an intra-β-sheet disulfide bond in the V-set domain, a predicted interdomain disulfide and a canonical inter-β-sheet disulfide within the C2 set domain. The postulated interdomain disulfide is a unique feature of the siglec family.

[0626] There is significant amino acid and nucleotide sequences homology among the Siglec 1-7. cDNAs for all of the Siglecs are known (See Example 58). Siglecs 3, 5, 6 and 7 form a closely related cluster. Siglec family members CD33-or Siglec 3 (SEQ ID O:58), Siglec 5 (SEQ ID NO:57), Siglec 6 (SEQ ID NO:55), and Siglec 7 (SEQ ID NO:59) contain a conserved consensus sequence surrounding the intracellular tyrosine residues of all four of these molecules [E(I/L)xYAxL-(12-18 residues)-(T/N)EYSE(L/V)(K/R)] (SEQ ID NO:53). As with Siglec-2 and 4a, the cytoplasmic tail of Siglec-3 is tyrosine-phosphorylated upon engagement. Once the tyrosines are phosphorylated, the first one is part of an ITIM (Immunoreceptor Tyrosine-based Inhibitory Motif; consensus: L/I/V/SxYxL/V), which is found in many members of the Ig superfamily (including Siglec-2/CD22), and forms a potential docking site for the SHP-1 tyrosine phosphatase. The second tyrosine-containing motif [(T/N)EYSE(I/V)] (SEQ ID NO:54) is similar to the sequence (TxYxxI/V) reported in SLAM, an immunoregulatory molecule of the Ig superfamily. This motif is the docking site in SLAM for an SH2-containing molecule SAP (SLAM-associated protein), which blocks recruitment of the tyrosine phosphatase SBP-2 to its docking site in the SLAM cytoplasmic region.A similar interplay occurs between the recruitment of phosphatases to the ITIM motif in Siglecs and the presence of SAP or SAP-like inhibitors to the SAP binding motif.

[0627] In contrast to the majority of immunoglobulin superfamily members which recognize protein ligands, Siglec family members have all been shown to bind to specific sialylated glycans. Each Siglec recognizes aspects of its sialylated ligands, such as the side chain, the N-acyl group, the linkage from the 2-position, and sometimes the underlying sugars Whereas CD22 strongly prefers glycans terminating in the Siaα2-6Gal, the other members of the family bind to Siaα2-3-Gal-terminating structures. Sn preferentially interacts with cells of the granulocytic lineage and MAG with neuronal processes. Siglec-6 (SEQ ID NO:55) has a protein ligand, i.e., leptin. For sialoadhesin (Siglec 1) and MAG (Siglec 4a), specific cell populations bearing their cognate ligands are granulocytic linage cells and neuronal processes respectively.

[0628] The sialic acid binding property of the family is mediated primarily by an amino-terminal V-set Ig domain, with some contribution by the next C2-set domain. Recognition involves the entire sialic acid molecule, including the carboxylate group at the 1-position, the linkage from the 2-position, the N-acyl group at the 5-position, and the exocyclic hydroxyl groups at the 7-, 8-, and 9-positions. Arginine present in all the Siglecs is is essential for sialic acid-dependent binding. Other important interactions include hydrophobic contacts between conserved aromatic amino acids on the A and G B strands of the V set domains with the N-acetyl and glycerol side groups of N-acetyl-neuraminic acid. For Sn and CD22, the binding site has been mapped to the GFCC′ face of the V-set domain by site directed mutagenesis. In the center of this site is an arginine residue which is found in all members of the Siglec family. The high sequence similarities in this area suggests that it represents the binding site also in MAG, SMP and CD33. For MAG the Arg residue is necessary for the binding of sialylated glycans.

[0629] Myelin Associated Glycoprotein (Siglec 4a) (SEQ ID NO:56)

[0630] The ligands for myelin-associated glycoprotein (MAG, Siglec 4a) are a limited set of structurally related gangliosides, known to be expressed on myelinated neurons in vivo. The neural sialoadhesins, myelin associated glycoprotein (MAG) and Schwann cell myelin protein (SMP), had similar and stringent binding specificities. Each required an a2,3-linked sialic acid on the terminal galactose of a neutral saccharide core, and they shared the following rank-order potency of binding: G_{Q1ba}>>G_{D1a}=G_{T1b}>>G_{M3}=G_{M4}>>G_{M1}, G_{D1b}, G_{D3}, G_{Q1b} (nonbinders). Major brain gangliosides G_{T1b} and G_{D1a} adhere to MAG. The simplest ganglioside ligand for MAG is G_{M3} bearing N-acetylneuraminic acid, whereas G_{M3} bearing N-glycolylneuraminic acid did not support adhesion. The simplest ganglioside ligand for MAG is G_{M3} bearing N-acetylneuraminic acid, whereas G_{M3} bearing N-glycolylneuraminic acid did not support adhesion. G_{Q1b} alpha expressed on cholinergic neurons, is more potent than G_{T1b} or G_{D1a} in supporting MAG-mediated cell adhesion. An alpha 2,3-N-acetylneuraminic acid residue on the terminal galactose of a gangliotetraose core is necessary for MAG binding, and additional sialic acid residues linked to the other neutral core saccharides [Gal(II) and GalNAc(III)] contribute significantly to binding affinity. Binding is enhanced by pretreatment of MAG-expressing cells with neuraminidase. For MAG, the specific cell populations bearing its cognate ligands are neuronal processes.

[0631] Sialoadhesin

[0632] Sialoadhesin had less exacting specificity, binding to gangliosides that bear either terminal α2,3- or α2,8-linked sialic acids with the following rank-order potency of binding: G_{Q1ba}>G_{D1a}=G_{D1b}=G_{T1b}=G_{M3}=G_{M4}>G_{D3}=G_{Q1b}>>G_{M1}. In the case of sialoadhesin (Sigiec-1), a crystal structure has been elucidated in the presence of bound ligand, confirming that all of these aspects of the sialic acid molecule are actually in direct contact with the binding site. Target ligands for the sialoadhesins are glycoconjugates in which a terminal sialic acid is essential for binding. Sialoadhesin binds predominantly to terminal α2,3-linked sialic acids, although weaker binding to α2,8-linked sialic acids was demonstrated. In contrast, CD22 bound only to α2,6-linked sialic acids, whereas MAG and CD33 bind only to α2,3-linked sialic acids. Among structures with α2,3-linked sialic acids, MAG bound preferentially to “3-0” structures (NeuAc α2,3Galβ1,3GalNAc), which are common termini on gangliosides (the major sialoglycoconjugates of the nervous system) and 0-linked glycoproteins. Sialoadhesin and CD33 bound similarly to “3-0” and “3-N” (NeuAc α2,3Galβ1,4GlcNAc) structures.

[0633] CD22 (Siglec 2)

[0634] CD22 (Siglec 2) a B lymphocyte antigen preferentially binds to glycans terminating in Siaα2-6Gal and glycoconjugates terminating in sialic acid. The minimal structure recognized by this lectin is the trisaccharide Siaα2-6Galβ1-4GlcNAc, as found on N-linked, 0-linked, or glycolipid structures. One prominent ligand for CD22 is the highly glycosylated leukocyte surface protein CD45. CD22 binds to the sialoglycoconjugate NeuAcα2-6Galβ1-4GlcNAc carried on CD45-thy N-glycans. The other members of the family bind to Siaα2-3Gal-terminating structures. Specifically, the critical features required for CD22 binding include the exocyclic hydroxylated side chain of the Sia residue and the αC2-6 linkage position to the underlying Gal unit. CD22 expressed on cell surfaces is structurally and functionally a multimeric protein, demonstrating a higher apparent affinity for multiply sialylated compounds over monosialylated compounds.

[0635] CD33 (Siglec 3)

[0636] CD33 is a member of the Ig superfamily that is restricted to cells of the myelomonocytic lineage but whose functions and binding properties are unknown. It shares sequence similarity with sialoadhesin, CD22, and the myelin-associated glycoprotein which constitute the sialoadhesin family of sialic acid-dependent cell adhesion molecules. CD33 is a fourth member of this family. A recombinant soluble form of CD33, Fc-CD33, bound red blood cells with a specificity similar to that of sialoadhesin, preferring NeuAcα2,3Gal in N- and 0-glycans over NeuAcα2,6Gal in N-glycans. Pretreatment of the CD33-transfected cells with sialidase rendered them capable of mediating sialic acid-dependent binding. CD33 can function as a sialic acid-dependent cell adhesion molecule and that binding can be modulated by endogenous sialoglycoconjugates when CD33 is expressed in a plasma membrane.

[0637] The Siglec polypeptide family of receptors, homologues or mimics are prepared from their cDNAs using recombinant techniques as in Example 58. These receptors are used to bind circulating immunosuppressive Lip-TAAs in vivo. They are expressed as part of a chimeric receptor with additional molecules such as Fc fragments which faciltate the removal of Lip-TAAs from the tumor bearing host. They are also useful when administered in advance of T cells, NK cells or APCs in which IR_{TAA}, IR_{IDA} inhibitory receptors have been deleted ex vivo (e.g., via gene knockout) or inactivated (e.g., via antisense) Example 58.

[0638] Additional Lip-TAA Binding Molecules: (SEQ ID NOS:60-61)

[0639] Prosaposin (SAP precursor) exists as an integral membrane protein bound by a mannose-6-phosphate-independent mechanism. Prosaposin is the precursor or four smaller lysosomal saposin A, B, C and D proteins. Both prosaposin and mature saposins interact specifically with glycolipids and serve as nonenzymatic coactors in the hydrolysis of glycosphingolipids by acidic glycosidases. As a family they are are known as sphingolipid activator proteins. Prosaposin is the only member of the saposin family with an extralysosomal location existing as a membrane bound or secretory protein. It exhibits ubiquitous expression, evolutionary conservation, and diverse tissue inducibility.

[0640] The function of the secreted form of prosaposin is as a glycolipid binding and transfer protein in vivo. Prosaposin and saposins are capable of transferring gangliosides from donor liposomes to acceptor membranes including erythrocyte ghost membranes. With its four lipid binding domains prosaposin forms clusters with certain sphingolipids in the plasma membrane and regulates their endocytosis and degradation. Prosaposin, but not mature SAPs, has been detected in human secretory fluids like cerebrospinal fluid, semen, milk, pancreatic juice, and bile. In rat tissues, skeletal muscle, heart, and brain contain mainly precursor forms, while mature forms dominate in spleen, lung, liver and kidney.

[0641] Prosaposin and saposins A, B, C, and D form stable complexes with 13 different gangliosides. Gangliosides of the gangliotetraose type (“a”) series) bind with high affinity, whereas (“b”) series gangliosides, 0-acetylated gangliosides, and gangliosides with shorter carbohydrate chains, bind with lower affinity. Several gangliosides (“a” series) bind to prosaposin with high affinity forming stable ganglioside-prosaposin complexes.

[0642] The derived amino acid sequence of SAP precursor is given in O'Brien J S et al., Science 241: 1098-1101 (1988). Amino acids 229 to 323 are colinear with the chemically sequenced amino acids of SAP-2. The nucleotide sequence from which the protein sequence was derived is deposited in the GenBank (access code J03086). The four SAP-like domains are aligned to emphasize the nearly identical placement of cysteine residues, glycosylation sites, and conserved proline residues.

[0643] Prosaposin cDNA has been elucidated by O'Brien J S et al., Science 241: 1098-1101 (1988). The open reading frame contains regions coding for mature SAP-1 and SAP-2 and the four SAP-like domains. Domains 1 to 4 correspond to amino acid residues 47 to 130, 182 to 262, 298 to 377, and 392 to 474, respectively. The prosaposin gene covers a region of at least 17 kb on segment q21 of chromosome 10. The positions of its 14 introns, the cysteine residues and the N-glycosylation sites show some regularities supporting the assumption that the sap-precursor gene arose by sequential duplication of an ancestral gene coding for only one sap. Exon 8 consists of only nine base pairs which code for three amino acids near the C-terminus of sap-B. In different human cDNA libraries, cDNAs are found with or without the nine bases of exon 8. After amplification by polymerase chain reaction and direct sequencing, these two forms and a third one containing only the last six bases of exon 8 are detected in cDNAs prepared from cultured human skin fibroblasts. All three forms are found in cells from a normal proband and from two patients with sap-B deficiency due to a point mutation in exon 7. The cDNA of prosaposin without the nine extra bases of exon 8 encodes a polypeptide chain of 524 amino acids starting with a typical signal peptide or amino acids for entering the ER.

[0644] The prosaposin cDNA construct is also generated by amplifying a rat testicular Zap cDNA library by PCR (polymerase chain reaction) with two synthetic oligonucleotide primers. A positive signal of 1.7 KB was isolated, subcloned into the pGEM-7Zf(+). Sequence analysis showed a near-identical nucleotide and amino acid similarity to a previous rat prosaposin cDNA.

[0645] The nucleic acids encoding Siglecs, prosaposin, saposins or other Lip-TAA binding proteins are inserted into the RNA (or DNA) replicating vector to create a pRep-Lip-TAA binding protein. This construct is administered in vivo, e.g., intratumorally, subcutaneously or parenterally wherein it produces the Lip-TAA binding protein which binds to Lip-TAAs produced or shed by tumor cells and prevents them from exerting their immunosuppressive effects on host T cell and antigen presenting cell function.

[0646] Saposins

[0647] Saposins are a family of four small glycoproteins, all of which are derived from prosaposin, and are involved in the lysosomal hydrolysis of various sphingolipids. They are water soluble and highly hydorphobic. Saposin B binds to complex gangliosides (such as _{GM1} and G_{D1a}) and transports them from donor to acceptor liposomes. Prosaposin and all the saposins bind gangliosides, sulfatides, and cerebrosides to varying degrees and facilitate glycolipid insertion into erythrocyte ghosts or brain microsomes to differing extents. Also, the sulfatide activator protein (SAP A) markedly accelerates the transfer of complex gangliosides compared with simpler glycolipids having shorter carbohydrate chains.

[0648] The amounts of ganglioside bound in vivo depends on many factors, including the state of the ganglioside (micellar or membrane bound), the type of ganglioside, the pH of binding, the presence of divalent cations, other lipids, and other binding proteins. The highest affinity of prosaposin (and saposins A, B, C, and D) is for the “a” series gangliotetraose-type gangliosides possessing terminal sialic acid residues. Ganglioside G_{Q1b} has a unique potency to enhance neuroblastoma cell proliferation and to increase the number and total length of neurites (neuritogenesis) in vitro. This ganglioside is bound tightly by prosaposin.

[0649] Although one SAP, i.e. G_{M2} activator protein, has been shown to display in vitro glycolipid transfer activity, this SAP is clearly selective for ganglioside G_{M2} Other SAPs (four of five) are encoded by a single gene and enter the lysosome as a single 65-73-kDa precursor chain that is processed into four similarly sized (˜13 kDa), fairly homologous polypeptides (SAPs A-D) that are heavily glycosylated and have acidic pI values.

[0650] Homologies among the saposins range between 16% (saposin B/saposin C) and 39% (saposinA/saposin C) with 15 amino acids being conserved in all four proteins, among them all six cysteine residues and an N-glycosylation signal. When placement of amino acids with similar properties at the same position in each sequence is considered, the similarity among saposins increases to between 47% (saposin B/saposin C) and 60% (saposin A/saposin C).

[0651] Models of each saposin indicate a compact rigidly cross-linked disulfide-bridged polypeptide containing a common hydrophobic pocket, suggesting that they should all act as lipid binding proteins.

[0652] cDNAs encoding for SAP-1 and SAP-2 have been isolated (O'Brian J S et al., Science 241: 1098-1101 (1988)). The nucleotide sequence of the largest cDNA is colinear with the derived amino acid sequence of SAP-2 and with the nucleotide sequence of the cDNA coding for the 70-kilodalton prosaposin (prosaposin cDNA). The coding sequence for mature SAP-2 is located 3′ to that coding for SAP-1 in the prosaposin cDNA. Both SAP-1 and SAP-2 are derived by proteolytic processing from a common precursor that is coded by a genetic locus on human chromosome 10. Two other domains similar to SAP-1 and SAP-2 are also identified in prosaposin. Each of the four domains is approximately 80 amino acid residues long, has nearly identical placement of cysteine residues, potential glycosylation sites, and proline residues. Each domain also contains internal amino acid sequences capable of forming amphipathic helices separated by helix breakers to give a cylindrical hydrophobic domain that is stabilized by disulfide bridges. Protein immunoblotting experiments indicate that prosaposin (70 kilodaltons) as well as immunoreactive SAP-like proteins of intermediate sizes (65, 50, and 311 kilodaltons) are present in most human tissues.

[0653] Glycolipid Transfer Protein (SEQ ID NO:63)

[0654] Glycolipid transfer protein (GLTP), a nonglycosylated, cytoplasmic protein is present in most animal cells, and is a cytoplasmic protein. The purified protein has a molecular weight near 23 kDA and has an isoelectric point near 9.0. It contains 209 amino acids residues a high level of amino acids with non-polar side chains (48%). Northern blot analysis of shows a single transcript of 2.2 kilobases and the following hierachy of RNA levels: cerebrum>kidney>spleen congruent with lung congruent with cerebellum>liver>heart muscle. The amino acid sequence of a glycolipid transfer protein from pig brain has been determined by automatic sequencing and fast atom bombardment mass spectroscopic analysis of peptides produced by chemical and enzymatic cleavage reactions. The protein consists of 208 residues, with N-acetylalanine as the N-terminal residue and valine as the C-terminal residue. It contains 3 cysteine residues. The primary structure of the glycolipid transfer protein from pig brain is as follows: (SEQ ID NO:62) acetyl-A-L-L-A-E-H-L-L-K-P-L-P-A-D-K¹⁵-Q-I-E-T-G-P-F-L-E-A-V-S-H-L-P³⁰-P-F-F-D-C-L-G-S-P-V-F-T-P-I-K⁴⁵-A-D-I-S-G-N-I-T-K-I-K-A-V-Y-D⁶⁰-T-N-P-A-K-F-R-T-L-Q-N-I-L-E-V⁷⁵-E-K-E-M-Y-G-A-E-W-P-K-V-G-A-T⁹⁰-L-A-L-M-W-L-K-R-G-L-R-F-I-Q-V¹⁰⁵-F-L-Q-S-I-C-D-G-E-R-D-E-N-H-P¹²⁰-N-L-I-R-V-N-A-T-K-A-Y-E-M-A-L′³⁵-K-K-Y-H-G-W-I-V-Q-A-A¹⁵⁰-L-Y-A-A-P-Y-K-S-D-F-L-K-A-L-S′⁶⁵-K-G-Q-N-V-T-E-E-E-C-L-E-K-V-R¹⁸⁰-L-F-L-V-N-Y-T-A-T-I-D-V-I-Y-E′⁹⁵-M-Y-T-K-M-N-A-E-L-N-Y-K-V-OH. The purified GLTP is a mixture of two forms of a protein; one of them (about 15%) with an intramolecular disulfide bond, and a reduced form (about 800) without one. GLTP with an intramolecular disulfide bond has twice as much activity as the reduced form, and formed more GLTP-glycolipid complex. GLTP is distinctly different from other soluble proteins that interact with glycolipids such as other types lipid transfer proteins, and lectins with mannose recognition/binding domains.

[0655] GLTP is specific for neutral glycosphingolipids and gangliosides but not phospholipids or neutral lipid intermembrane transfers. The protein transfers, by a carrier mechanism, glycolipids with a β-glucosyl or β-galactosyl residue directly linked to either ceramide or diacylglycerol hydrophobic backbone. It has been shown that GLTP facilitates the transfer of glycolipids only when both the donor and acceptor membranes are in the liquid-crystalline state. The GLTP-glycolipid complex is formed as a result of removal of a glycolipid molecule from a membrane and binding to a GLTP molecule. GLTP from pig brain facilitates the transfer of glycosphingolipids which include glucosylceramide, galactosylceramide, lactosylceramide, sulfatide, lactosylceramide-II-sulfate, globotriaosylceramide, globotetraosylceramide, globopentaosylceramide, sialosyllactosylceramide, and GM₁ ganglioside. The transfer of Manβ1-4Glcβ1-ceramide and Manα1-4Manβ1-4Glcβ1-ceramide is also facilitated by GLTP from pig brain. In addition to glycosphingolipids, GLTP from pig brain also facilitates the transfer of 3-[Galβ1]-sn-1,2-diacylglycerol, 3-[Galα1-6Galβ1]-sn-1,2-diacylglycerol, and 3-[Glcβ1]-rac-1-2-dipalmitylglycerol. The protein does not facilitate the transfer of 3-[Man_{—}α1-3Manα1]-sn-1,2-diacylglycerol, 3-[Glcα1]-sn-1,2-diacylglycerol, phosphatidylcholine, phosphatidylinositol, phosphatidylethanolamine, cholesterol, or cholesteryl oleate. GLTP from pig brain stimulates the transfer of pyrene-labeled sphingomyelin to a very small but significant extent. GLTP recognizes and binds the sugar residue directly linked to either ceramide or diacyglycerol in addition to the nonpolar portion of glycolipids.

[0656] The cloned bovine and porcine brain cDNAs for GLTP contain 627-bp open reading frames. The encoded amino acid sequences in the full-length bovine and porcine cDNAs are identical, consisting of 209 amino acid residues, Expression of GLTP-cDNA in Escherichia coli using pGEX-6P-1 vector results in glutathione S-transferase-GST-GLTP fusion protein with 50% of expressed fusion protein being soluble and active. Proteolytic cleavage of GSTGLTP fusion protein (bound to GST-Sepharose) and affinity purification resulted in fully active GLTP. Northerm blot analyses of bovine tissues showed a single transcript of ˜2.2 kilobases and the following hierarchy of nmRNA levels: cerebrum>kidney>spleen, lung, cerebellum>liver>heart muscle.

[0657] Non-Specific Lipid Transfer Proteins (nsLTPs)

[0658] Nonspecific lipid transfer proteins (nsLTPs) are present in both animals and plants and represent a group soluble proteins that catalyze the in vitro transfer of a wide range of lipids, including glycolipids. Although able to transfer different neutral glycosphingolipids and ganglioside G_{M1} between membranes, nsLTPs clearly differ from GLTP with regard to lipid selectivity and ability to actively transfer all common phosphoglycerides as well as cholesterol. Also, despite having basic isoelectric points (p1 8.6-9.6) like GLTP (p1 9.0), nsLTPs are much smaller (13.2 kDa) than GLTP (23.9 kDa) and are initially encoded in precursor form (15.3 kDa; pre-nsLTP). A tripeptide targeting sequence (Ala-Lys-Leu) in the C-terminal end directs certain nsLTPs to peroxisomes, where a 20-amino acid presequence is cleaved. No known organelle targeting sequences appear in the primary sequence of GLTP, which is consistent with its putative cytoplasmic localization. Given the differences in selectivity and structure along with the lack of sequence homology revealed by searches on-line data bases, available evidence indicates that GLTP is distinctly different from known nsLTPs and other lipid transfer proteins.

[0659] A non-specific transfer protein isolated from beef liver accelerates the exchange and net transfer of phospholipids and cholesterol between natural and artificial membranes (Crain R C et al., Biochemistry 19:1433-1439 (1980)). The bovine liver protein transfers phosphatidylcholine, phosphatidylethanolamine, phosphatidylinositol, sphingomyelin, phosphatidic acid, phosphatidylserine, phosphatidylglycerol, and cholesterol and also promotes net transfer of phospholipids from multilamellar vesicles to human high density lipoproteins or from small unilamellar vesicles to mitoplasts. This protein also accelerates the net transfer of cholesterol from small unilamellar vesicles to multilamellar vesicles.

[0660] Bloj et al., J. Biol. Chem. 256:5988-5991 (1981) demonstrated that this protein also accelerates the transfer of labeled glycosphingolipids between membranes. The protein shows little specificity toward the polar head of complex lipids and is known to transfer the sphingophospholipid, sphingomyelin. Di-palmitoylphosphatidylcholine is transferred 2.6 times faster than globotetraglycosylceramide from egg phosphatidylcholine vesicles to erythrocyte ghosts. Crain et al., Biochemistry 19:1433-1439 (1980)) noted that phosphatidylcholine transfer was 3 times faster than that of sphingomyelin. Glycerophospholipids are better substrates than sphingolipids for the lipid transfer protein.

[0661] The nonspecific lipid transfer protein is the first protein shown to move complex neutral glycosphingolipids and gangliosides between membranes. In vivo such proteins serve to facilitate the transfer of glycolipids from their sites of initial synthesis to other sites where glycosylation may take place or where the glycolipids express their biological functions.

[0662] Additional Ganglioside Binding Proteins

[0663] Ganglioside binding proteins especially in brain or cultured neuronal cell lines are membrane-associated and specifically bind gangliosides of the “b” series with high affinity. This protein is localized to myelin membrane preparations; it differs from prosaposin in both specificity and localization. In cultured cerebral granular cells several membrane proteins bind photoreactive ganglioside G_{M1} derivative. Two prominent proteins so-labeled are released by trypsin and their molecular masses (46 and 31 kDa) are similar to the initial products of proteolysis of prosaposin. However, additional binding proteins varying from 12 to 112 kDa are also present and other ganglioside binding proteins that have basic isoelectric points.

[0664] Two glycolipid transfer proteins isolated from calf brain catalyze the transfer of gangliosides and neutral glycosphingolipids from phosphatidylcholine vesicles to erythrocyte ghosts (Gammon C M et al., Biochemistry 26: 6239-6243 (1987)). Purification by differential centrifugation, ammonium sulfate precipitation, and gel filtration and fast protein liquid chromatography (Mono S), produced two peaks of activity. The major band of both fractions with a molecular mass of approximately 20,000 daltons catalyzed the transfer of ganglioside GM 1 as well as asialo-G_{M1}, but transfer protein I (TPI) is more effective with di- and trisialogangliosides. Transfer protein II (TPII)is more specific for neutral glycolipids in that G_{A1} is transferred more rapidly than any of the gangliosides; however, lactosylceramide transfer is relatively slow. Neither protein catalyzed transfer of phosphatidylcholine.

[0665] The specific transfer activity toward additional glycolipid substrates revealed TPI to be more reactive toward G_{M1} than G_{A1}, its asialo derivative. The other gangliosides are only slightly less reactive while Lac-Cer is the least effective substrate. A different order of reactivity is seen for TP II: G_{A1} was transferred somewhat more efficiently than GM1, and the other gangliosides are transferred at considerably lower rates. Neither protein catalyzes the transfer of phosphatidylcholine.TPI, with an apparent preference for gangliosides over neutral glycolipids of shorter chain is a different protein from GLTP. The fact that neither this transfer proteins nor GLTP catalyzed transfer of phospholipids indicates a basic difference from the transfer protein of bovine liver described by Bloj et al., J. Biol. Chem. 256:5988-5991 (1981).

[0666] The activator protein which promotes hexosarninidase A catalyzed hydrolysis of G_{M2} and G_{A2} also functions as a ganglioside transfer protein in the absence of enzyme (Conzelmann W et al., Eur. J Biochem. 123:455-464 (1982)). The activator protein extracts glycolipid monomers from micelles or liposomes to give water-soluble complexes with a stoichiometry of 1 mol of glycolipid/mol of activator protein. In the absence of enzyme the activator acts in vitro as glycolipid transfer protein, transporting glycolipids from donor to acceptor membranes. The activator protein is specific for ganglioside G_{M2}. Other glycolipids (G_{M3}, G_{M1}, G_{D1a} and G_{A2}) form less stable complexes with the activator and are transferred at a slower rate (except for ganglioside G_{M1}) than ganglioside G_{M2}.

[0667] In the present invention, Lip-TAAs receptors on T cells, NKT cells, NK cells and/or antigen presenting cells are inhibited deleted or mutated (to functionally deactivate them) in vivo using antisense techniques given in Examples 51, 52. These receptors are tested in vivo in animal models as given in Examples 51, 52, 57-59. Ex vivo deletion, inhibition, mutation of LipTAAs receptors on immunocytes or accessory cells is effected by antisense or gene knockout or ribozyme knockout techniques (Examples 51, 57-50). These cells with deleted or inactivated LipTAAs receptors are incubated with Lip-TAAs ex vivo for 24 hours. They are also effective without specific ex vivo antigen stimulation assuming that they will encounter the specific Lip-TAA in vivo. They are useful in adoptive immunotherapy protocols given in Examples 57-59. Prior to the adoptive transfer of IR_{TAA} depleted and activated immunocytes or APCs (1-4 hours is preferred but 24-72 hours is acceptable), tumor bearing hosts are treated with decoy LipTAA receptor polypeptides to prevent circulating LipTAAs associated with serum lipoproteins from tolerizing the infused immunocytes or accessory cells (Examples 57-59).

[0668] In another embodiment, purified LipTAAs receptor or transfer protein genes are used to prepare purified LipTAAs receptor or transfer polypeptides. These structures are useful as intact polypeptides, fragments or chimeric (e.g., fused to Fc fragment) proteins with conserved Lip-TAA binding domains. These purified receptors, fragments or chimeras are useful as decoys in vivo to bind Lip-TAAs in vivo thus preventing them from exerting their immunosuppressive effects on immunocytes and accessory cells. They are prepared in soluble form or they are incorporated into phage displays or liposomes and used in vivo in tumor systems given in Examples 57-59.

[0669] 57. Deletion of Nucleic Acids Encoding Src-like Adapter Protein (SLAP) SLAP Protein

[0670] The Src-like adaptor protein (SLAP) (SEQ ID NO:64) contains Src homology (SH)3 and SH2 domains, which are highly homologous to those of Lck and other Src family members. Like Lck, this Src-like adaptor protein (SLAP) contains a short unique NH₂-terminal domain, followed by SH3 and SH2 domains. However, it does not contain a tyrosine kinase domain. Instead of a kinase domain. SLAP contains a unique COOH terminus of 104 residues. Both the SH3 and SH2 domains of SLAP are highly homologous to those of Lck and share with them 55 and 50% identity, compared with 42 and 43% with c-Src, respectively A structure-function analysis revealed that both the SH3 and SH2 domains contribute to this inhibitory function. SLAP was cloned using a yeast two-hybrid screen.

[0671] SLAP is expressed in T cells. When expressed in Jurkat T cells it can specifically inhibit TCR signaling leading to nuclear factor of activated T cells (NEAT)-, activator protein I (AP-1)-, and interleukin 2-dependent transcription. The SH3 and SH2 domains of SLAP are required for maximal attenuation of TCR signaling. SLAP acts proximally in the TCR signaling pathway. In stimulated Jurkat cells, SLAP associates with a molecular signaling complex containing CD3ζ, ZAP-70, SH2 domain-containing leukocyte protein of 76 kD (SLP-76), Vav, and possibly linker for activation of T cells (LAT). Collectively, these results suggest that SLAP interacts with the stimulated TCR complex to downregulate TCR-mediated signals by interfering with the proximal signaling events. Therefore, the differential expression of SLAP protein in T cells regulates sensitivity to TCR stimulation, thus influencing mature T cell responses to antigenic stimulation.

[0672] The present invention contemplates the deletion of inhibitory adaptor proteins such as SLAP from T cells in tumor bearing hosts using antisense techniques in vivo as given in Example 51. Alternatively, SLAP deletion can be achieved ex vivo in a population of T cells using gene knockout or antisense techniques as given in Examples 51-52. These T cells are harvested and used for the adoptive immunotherapy of cancer as given in Examples 15, 16, 21, 23.

[0673] 58. Superantigen Conjugated to Thrombospondin I and Type 1 Repeat Peptides of Thrombospondin and Other Molecules Inducing Apoptosis of Endothelial Cells

[0674] In the present invention, superantigens are conjugated to molecules which induce apoptosis of endothelial cells. Superantigens are known to induce tissue inflammation and in the absence of effector cells or their mediators are capable of inducing endothelial cell injury. They are conjugated to thrombospondin 1 and type 1 repeat peptides of thrombospondin which also induce apoptosis of tumor neovascular endothelial cells. The native sequence KRFKQDGGWSHWSPWSSC (SEQ ID NO:65) or the modified sequence which lacks the TGF-B activating sequence KRAKAAGGWSHWSPWSSC (SEQ ID NO:66) equally stimulated DNA fragmentation. The basic residues and the WSXW motif are both required for optimal activity. The thrombospondin and/or the superantigen in the conjugate may be used in nucleic acid form. The superantigen polypeptide or nucleic acid in the conjugate is capable of evoking an inflammatory response in the tumor microvasculature while the thrombospondin induces apoptosis of tumor endothelial cells. Conjugations of polypeptides and/or nucleic acids are carried out by methods given in Example 4 and 5. The conjugates are prepared by chemical crosslinking using homo or heterobifunctional crosslinking agents, carbodiimide, cyanoborhydride or glutaraldehyde as given in Hermanson G. Bioconjugate Technology Academic Press, New York, N.Y. (1996). They are also prepared as fusion proteins or phage displays according to protocols given in Examples 5 and 6. They are also useful in nucleic acid form as a chimeric SAg-thrombospondin nucleic acid construct since the CD36 gene has been cloned (Wyler B et al., Thromb Hemost 70: 5001505 (1993); Armsella A L et al., J. Biol. Chem. 269: 18985-18991 (1994). The conjugates are useful as a preventative or therapeutic anti-tumor vaccine according to Examples 15, 16, 18-23. They are also used ex vivo to produce tumor specific effector cells for adoptive immunotherapy of cancer (Examples 2-5, 7, 15, 16, 18-23).

[0675] Having now generally described the invention, the same will be more readily understood through reference to the following examples which are provided by way of illustration, and are not intended to be limiting of the present invention, unless specified.

[0676] 59. Removal of SE-Specific Antibodies with Anti-Idiotype Antibodies

[0677] It is well established that naturally occurring antibodies specific for SEs are present in a large percentage of human patients. During clinical trials using a fusion protein of SEA conjugated to a tumor specific antibody, antibodies specific for SEA appeared in the serum. The titer of these antibodies often rose with treatment and their appearance correlated with increased toxicity. These antibodies also interfere with the ability of the SE conjugates to induce tumoricidal effects by binding to the T cell activating epitopes of SE in the conjugates precluding the conjugate from stimulating a tumoricidal T cell response. The antibody-bound SE conjugates as large immune complexes are also readily taken up by reticuloendothelial cells and therefore diverted from targeting the tumor.

[0678] To solve this problem, antibodies specific for the idiotypic region of anti-SE antibodies are prepared by methods given in Example 57. The anti-idiotype is preferably of the Ab2β reticuloendothelial cells which is an internal image anti-idiotype and has the capacity to mimic the antigen used to generate the SE-specific antibody. The Ab2γ antibody recognizes an Id within the anitgen binding site, a characteristic similar to Ab2β but fails to exhibit biological mimicry of the antigen. This particular subset of anti-idiotype antibodies would be the most desireable in the present case as it would not further activate the host anti-SE response, however the others could be usefule as well. The anti-Ids could also be prepared in hybridoma or genetic form and used in vivo (via transfection of autologuous antibody producing cells or implantable chambers) to provide a continuous amount of anti-id for the duration of use of the SE-conjugates).

[0679] The anti-Ids could be prepared and administered as less immunogenic FAB, FAB₂′, or Fv fragments and humanized to avoid alloimmunization. In the case of SEB, the dominant B cell epitope is the C-terminial region (aa 225-234) which may be used to isolate the major SE specific antibodies. Anti-SE idiotypic antibodies are detected and characterized as given in Example 57. The amount of anti-idiotype antibody administered would be sufficient to neutralize all the circulating SE specific antibodies. Doses would range from 100 ng to 1000 mg and could be predicted based on in vitro neutralization tests determining the amount of antibody required to bind all of the antigen in a small volume of serum. When the the level of these antibodies is undetectable, the SE-tumor specific antibody conjugate is administered in doses effective to kill the tumor. This could range from 2-15 ng/kg-100 ug/kg of SE in the conjugate. Devoid of SE specific antibodies to neutralize T cell activating activating activity and divert the SE conjugate from the tumor site, the SE conjugate is able to target the tumor in vivo and initiate a tumoricidal response. The preferred route of injection is intravenous but other parenteral routes such as intraperitoneal, intrathecal and intratumoral may be useful as well. The preferred method of administration is via infusion although injection, sustained release formulations and microinfusion or osmotic pumps may also be useful.

[0680] 60. Functional Derivatives Proteins of Peptides

[0681] All of the protein and nucleic acid compositions given herein are intended to encompass functional derivatives. Similarly, Staphylococcal enterotoxins or superantigens are intended to encompass functional derivatives of a particular superantigen or enterotoxin.

[0682] By “functional derivative” is meant a “fragment,” “variant,” “homologue,” “analogue,” or “chemical derivative”, which terms are defined below. A functional derivative retains at least a portion of the function of the native protein monomer which permits its utility in accordance with the present invention.

[0683] A “fragment” refers to any shorter peptide. A “variant” of refers to a molecule substantially similar to either the entire protein or a peptide fragment thereof. Variant peptides may be conveniently prepared by direct chemical synthesis of the variant peptide, using methods well-known in the art.

[0684] A homologue refers to a natural protein, encoded by a DNA molecule from a different species, which shares a minimum amount of structure and thereby function with the reference protein. Homologues, as used herein, typically share about 50% sequence similarity at the DNA level or about 18% sequence similarity in the amino acid sequence.

[0685] An “analogue” refers to a non-natural molecule substantially similar to either the entire molecule or a fragment thereof

[0686] A “chemical derivative” contains additional chemical moieties not normally a part of the peptide. Covalent modifications of the peptide are included within the scope of this invention. Such modifications may be introduced into the molecule by reacting targeted amino acid residues of the peptide with an organic derivatizing agent that is capable of reacting with selected side chains or terminal residues.

[0687] The recognition that the biologically active regions of the enterotoxins, for example, are substantially structurally homologous enables predicting the sequence of synthetic peptides which exhibit similar biological effects in accordance with this invention (Johnson, L. P. et al., Mol. Gen. Genet. 203:354-356 (1886).

[0688] A common method for evaluating sequence homology, and more importantly, for identifying statistically significant similarities of the proteins, peptides and nucleic acids given herein is by Monte Carlo analysis using an algorithm written by Lipman and Pearson to obtain a Z value. According to this analysis, Z>6 indicates probable significance, and Z>10 is considered to be statistically significant (Pearson, W. R et. al., Proc. Natl Acad Sci. USA, 85:2444-2448 (1988); Lipman, D. J. et al, Science 227:1435-1441 (1985)). Synthetic peptides corresponding to the compositions and enterotoxins, are characterized in that they are substantially homologous in amino acid sequence to an enterotoxin with statistically significant (Z>6) sequence homology and similarity to include alignment of cysteine residues and similar hydropathy profiles.

[0689] 1. Variants

[0690] One group of variants are those in which at least one amino acid residue in the peptide molecule, and preferably, only one, has been removed and a different residue inserted in its place. For a detailed description of protein chemistry and structure, see Schulz, G. E.˜Principles of Protein Structure Springer-Verlag, New York, 1978, and Creighton, T. E., Proteins: Structure and Molecular Properties, W. H. Freeman & Co., San Francisco, 1983, which are hereby incorporated by reference. The types of substitutions which may be made in the protein or peptide molecule of the present invention may be based on analysis of the frequencies of amino acid changes between a homologous protein of different species, such as those presented in Table 1-2 of Schulz et aL (supra) and FIGS. 3-9 of Creighton (supra). Based on such an analysis, conservative substitutions are defined herein as exchanges within one of the following five groups:

[0691] 1. Small aliphatic, nonpolar or slightly polar residues: Ala, Ser, Thr (Pro, Gly);

[0692] 2. Polar, negatively charged residues and their aniides: Asp, Asn, Glu, Gln;

[0693] 3. Polar, positively charged residues: His, kg, Lys;

[0694] 4. Large aliphatic, nonpolar residues: Met, Leu, fle, Val (Cys); and

[0695] 5. Large aromatic residues: Phe, Tyr, Trp.

[0696] The three amino acid residues in parentheses above have special roles in protein architecture. Gly is the only residue lacking any side chain and thus imparts flexibility to the chain. Pro, because of its unusual geometry, tightly constrains the chain. Cys can participate in disulfide bond formation which is important in protein folding. Tyr, because of its hydrogen bonding potential, has some kinship with Ser, Thr, etc.

[0697] Substantial changes in functional or immunological properties are made by selecting substitutions that are less conservative, such as between, rather than within, the above five groups, which will differ more significantly in their effect on maintaining (a) the structure of the peptide backbone in the area of the substitution, for example, as a sheet or helical conformation, (b) the charge or hydrophobicity of the molecule at the target site, or (c) the bulk of the side chain. Examples of such substitutions are (a) substitution of gly and/or pro by another amino acid or deletion or insertion of Gly or Pro; (b) substitution of a hydrophilic residue, e.g., Ser or Thr, for (or by) a hydrophobic residue, e.g., Leu, fle, Phe, Val or Ala; (c) substitution of a Cys residue for (or by) any other residue; (d) substitution of a residue having an electropositive side chain, e.g., Lys, Arg or His, for (or by) a residue having an electronegative charge, e.g., Glu or Asp; or (e) substitution of a residue having a bulky side chain, e.g., Phe, for (or by) a residue not having such a side chain, e.g., Gly.

[0698] Most deletions and insertions, and substitutions according to the present invention are those which do not produce radical changes in the characteristics of the protein or peptide molecule. However, when it is difficult to predict the exact effect of the substitution, deletion, or insertion in advance of doing so, one skilled in the art will appreciate that the effect will be evaluated by routine screening assays, for example direct or competitive immunoassay or biological assay as described herein. Modifications of such proteins or peptide properties as redox or thermal stability, hydrophobicity, susceptibility to proteolytic degradation or the tendency to aggregate with carriers or into multimers are assayed by methods well known to the ordinarily skilled artisan.

[0699] In the present invention, functional derivatives of proteins, peptides, enterotoxins or other related toxins and nucleic acids include synthetic polypeptides and nucleic acids characterized by substantial structural homology to enterotoxin A, enterotoxin B and Streptococcal pyrogenic exotoxins with statistically significant sequence homology and similarity (e.g., Z>6 in the Lipman and Pearson algorithm in Monte Carlo analysis (see above)).

[0700] 2. Chemical Derivatives

[0701] Covalent modifications of the monomeric or polymeric forms of protein or peptide fragments thereof, of enterotoxins or peptide fragments thereof, or both are included herein. Such modifications may be introduced into the molecule by reacting targeted amino acid residues of the protein or peptide with an organic derivatizing agent that is capable of reacting with selected side chains or terminal residues. This may be accomplished before or after polymerization.

[0702] Cysteinyl residues most commonly are reacted with a-haloacetates (and corresponding amines), such as 2-chloroacetic acid or chloroacetamide, to give carboxymethyl or carboxyamidomethyl derivatives. Cysteinyl residues also are derivatized by reaction with bromotrifluoroacetone, a-bromo-(5-imidozoyl)propionic acid, chloroacetyl phosphate, N-alkylmaleimides, 3-nitro-2-pyridyl

[0703] disulfide, methyl 2-pyridyl disulfide, p-chloromercuribenzoate, 2-chloromercuri-4-nitrophenol, or chloro-7-nitrobenzo-2-oxa-1,3-diazole.

[0704] Histidyl residues are derivatized by reaction with diethylprocarbonate at pH 5.5-7.0 because this agent is relatively specific for the histidyl side chain. Para-bromophenacyl bromide also is useful; the reaction is preferably performed in 0.1 M sodium cacodylate at pH 6.0.

[0705] Lysinyl and amino terminal residues are reacted with succinic or other carboxylic acid anhydrides. Derivatization with these agents has the effect of reversing the charge of the lysinyl residues. Other suitable reagents for derivatizing a -amino-containing residues include imidoesters such as methyl picolinimidate; pyridoxal phosphate; pyridoxal; chloroborohydride; trinitrobenzenesulfonic acid; 0-methylisourea; 2,4 pentanedione; and transaminase-catalyzed reaction with glyoxylate.

[0706] Arginyl residues are modified by reaction with one or several conventional reagents, among them phenylglyoxal, 2,3-butanedione, 1,2-cyclohexanedione, and ninhydrin. Derivatization of arginine residues requires that the reaction be performed in alkaline conditions because of the high pK of the guanidine functional group. Furthermore, these reagents may react with the groups of lysine as well as the arginine epsilon-amino group.

[0707] The specific modification of tyrosyl residues per se has been studied extensively, with particular interest in introducing spectral labels into tyrosyl residues by reaction with aromatic diazonium compounds or tetranitromethane. Most commonly, N-acetylimidizol and tetranitromethane are used to form 0-acetyl tyrosyl species and 3-nitro derivatives, respectively.

[0708] Carboxyl side groups (aspartyl or glutamyl) are selectively modified by reaction with carbodiimides as noted above. Aspartyl and glutamyl residues are converted to asparaginyl and glutaminyl residues by reaction with ammonium ions.

[0709] Glutaminyl and asparaginyl residues may be deamidated to the corresponding glutamyl and aspartyl residues. Alternatively, these residues are deamidated under mildly acidic conditions. Either form of these residues falls within the scope of this invention.

[0710] Other modifications include hydroxylation of proline and lysine, phosphorylation of hydroxyl groups of seryl or threonyl residues, methylation of the a-amino groups of lysine, arginine, and histidine side chains (T. E. Creighton, Proteins: Structure and Molecule Properties, W. H. Freeman & Co., San Francisco, pp. 79-86 (1983)), acetylation of the N-terminal amine, and, in some instances, amidation of the C-terminal carboxyl groups.

[0711] Such derivatized moieties may improve the solubility, absorption, biological half life, and the like. The moieties may alternatively eliminate or attenuate any undesirable side effect of the protein and the like. Moieties capable of mediating such effects are disclosed, for example, in Remington 's Pharmaceutical Sciences, 16th ed., Mack Publishing Co., Easton, Pa. (1980).

### EXAMPLE 1

[0712] Preparation of Plasmids for Making DNA Templates for any Gene of Interest and the Process of Transfection

[0713] Mammalian oncogenes, and genes for oncogenic transcription factors, angiogenic factors, growth factor receptors and amplicons as well as bacterial and SAg plasmids and DNA are prepared as described in the text references. When necessary, they are modified to forms suitable for transfection into mammalian tumor cells or accessory cells using methods well in the art. (Old R W et al., Principles of Gene Manipulation, 5^{th} Ed., Blackwell 1994).

[0714] As a representative SAg, enterotoxin B plasmid DNA is prepared by the method of Jones C L et al., J. Bacteriology 166 29-33 (1986) and Ranelli et al., Proc. Natl. Acad. Sci. USA 82:5850-5854 (1985) using the CsCl-ethidium bromide density gradient centrifugation of cleared lysates as described (Clewell, D B et al., Proc. Natl. Acad. Sci. USA 62-1159-1166 (1969)). S. aureus chromosomal DNA was isolated as described by Betley M et al., Proc. Natl. Acad. Sci. USA 81: 5179-5183 (1984). E. coli HB101 was transformed with plasmid DNA by the CaCl2 procedure of Morrison D A et al., Meth. Enzymol. 68:326-331 (1979). Restriction digests were analyzed by 1% agarose and 5% acrylamide gel electrophoresis using Tris/Borate/EDTA buffer as described in Greene P J et al., Methods Mol. Biol. 7: 87-111 (1974). Additional methods for isolation and cloning of specific bacterial and mammalian plasmid DNA useful in tumor or accessory cell transfection are cited in references given previously in the text or in Snyder L et al., Molecular Genetics of Bacteria, ASM Press, Washington, D.C.(1997); Peters et al., supra; Franks et al., supra.

[0715] Suitable template DNA for production of mRNA encoding a desired polypeptide may be prepared using standard recombinant DNA methodology as described in Ausubel F et al. Short Protocols in Molecular Biology 3^{rd} Ed. John Wiley, New York, N.Y. (1995). There are numerous available cloning vectors and any cDNA containing an initiation codon can be introduced into the selected plasmid and mRNA can be prepared from the resulting template DNA. The plasmid can be cut with an appropriate restriction enzyme to insert any desired cDNA coding for a polypeptide of interest. For example the readily available cloning vector pSP64T can be used after linearization and transcription with SP6 RNA polymerase. Smaller sequence may be inserted into the Hind III/EcoTI fragment with T4 ligase. Resulting plasmids are screened for orientation and transformed into E. coli. These plasmids are adapted to receive any gene of interest at a unique BglII restriction site which is placed between the two Xenopus b-globin sequences.

[0716] Subcloning of SEB into pHβ-Apr-1-neo Expression Vector

[0717] The Staphylococcal enterotoxin B (SEB) gene has been subcloned into pHb-Apr-1-neo expression vector. The final construct contained only the coding sequence of SEB and conferred resistance to ampicillin and G-418.

[0718] Materials and Methods

[0719] PCR:

[0720] 1. The following two primers are designed and made at Life Technologies, Inc.:

Primer SEB1: total 24 bp (SEQ ID NO:3) 5′ to 3′
GGC.GTC.GAC.ATG.TAT.AAG.AGA.TTA
SalI site
Primer SEB2: total 24 bp (SEQ ID NO:4) 5′ to 3′
GCC.GGA.TCC.TCA.CTT.TTT.CTT.TGT

[0721] BamHI Site

[0722] Both primers were dissolved in filter-sterilized ddH2O to a final concentration of 20 mM (stock solution).

[0723] 2. The volume (in ml) of reagents for each PCR reaction is listed below:

| Reagent | Exp. 1 | Exp. 2 | Exp. 3 | Exp. 4 | Exp. 5 |
|---|---|---|---|---|---|
| ddH2O | 76 | 72 | 67 | 49 | 59 |
| 10 × PCR buffer 10 | 10 | 10 | 10 | 10 | |
| 10 × dNTP (2 mM stock) | 10 | 10 | 10 | 10 | 10 |
| Primer SEB1 | 1 | 5 | 1 | 10 | 10 |
| (20 mM stock) | | | | | |
| Primer SEB2 | 1 | 1 | 1 | 10 | 10 |
| (20 mM stock) | | | | | |
| SEB Template | 1 | 1 | 10 | 10 | 0 |
| (50 mg stock) | | | | | |
| PfuTurbo Enz | 1 | 1 | 1 | 1 | 1 |
| Final Volume | 100 | 100 | 100 | 100 | 100 |

[0724] 3. The following cycling parameters were applied:

| | | | |
|---|---|---|---|
| 95° C. | 1 minute | 1 cycle | initial denature |
| 95° C. | 45 seconds | denature | |
| 52° C. | 1 minute | 20 cycles | anneal |
| 72° C. | 1 minute | extension | |
| 72° C. | 1 minute | 1 cycle | final extension |
| 4° C. | hold | | |

[0725] 4. To verify that the PCR reactions yielded the correct size fragment, 10 ml of the reaction mixture was electrophoresed on a 1% agarose gel in 1×TAE buffer.

[0726] Vector

[0727] 1. The pHbβ-Apr-1-neo expression vector was spotted the vector on a filter paper. See FIG. 1

[0728] 2. To recover the DNA, the circle was cut out and added to 100 ml of H2O to allow rehydration for 5 minutes. After a brief centrifugation, the supernatant was used to transform E. coli XL1Blue (Stratagene), and selected by ampicillin (final concentration 100 mg/ml).

[0729] 3. To verify that the vector is correct, 4 ampR clones were randomly selected and the clones were cultured in LB amp media. DNA was isolated and digested with SalI, BamHI (single digest) and EcoRI/HindIII (double digest). The digested products were electrophoresed on a 1% agarose gel in 1×TAE buffer. The profile of the restriction digest confirmed that the vector is correct.

[0730] Cloning and Verification

[0731] 1. The correct PCR fragments in experiments 2, 3, and 4 were pooled and gel-purified. A portion of the fragments was digested with restriction enzymes SalI and BamHI, and was ligated into the digested pHb-Apr-1-neo expression vector. The ligation products were transformed into E. coli XL1Blue (Stratagene). Insert containing clones were selected by ampicillin.

[0732] 2. Ten ampicillin resistant clones were randomly selected, cultured in 5 ml of LB amp media, and their plasmid DNA was isolated. Insert containing clones (SEB construct) were verified by digesting the DNA with SalI and BamHI restriction endonucleases and electrophoresis at 0.8% agarose gel. (FIG. 2)

[0733] 3. One of the SEB constructs (clone #2) was verified by sequencing and aligned with the published SEB sequence (FIG. 3).

[0734] Purified DNA templates from bacteria and human cells are prepared for introduction of plasmid into human and bacterial cells by additional methods given in Ausubel F et al., supra. The plasmid DNA is grown up in E. coli in ampicillin containing LB medium. The cells were then pelleted by spinning a 5000 rpm for 10 min. at 5000 rpm., resuspended in cold TE pH 8.0, centrifuged again for 10 minutes. at 5000 rpm., resuspended in a solution of 50 mM glucose, 25 mM Tris-Cl pH 8.0, 10 mM EDTA and 40 mg/ml lysozyme. After incubation for 5-10 min. with occasional inversion, 0.2 N NaOH containing 1% SDS was added, followed after 10 minutes at 0° C. with 3 M potassium acetate and 2 M acetic acid. After 10 more minutes, the material was again centrifuged a 6000 rpm, and the supernatant was removed with a pipet. The pellet was then mixed into 0.6 vol. isopropanol (−20° C.), mixed, and stored at −20° C. for 15 minutes. The material was then centrifuged again at 10,000 rpm for 20 min., this time in an HB4 singing bucket rotor apparatus after which the supernatant was removed and the pellet was washed in 70% EtOH and dried at room temperature. Next, the pellet was resuspended in 3.5 ml TE, followed by addition of 3.4 g CsCl and 350 l of 5 mg/ml EtBr. The resulting material was placed in a quick seal tube, filled to the top with mineral oil. The tube was spun for 3.5 hours at 80,000 rpm in a VTi80 centrifuge. The band was removed and the material was centrifuged again making up the volume with 0.95 g CsCl/ml and 0.1 ml or 5 mg/ml EtBr/ml in TE. The EtBr was then extracted with an equal volume of TE saturated N-Butanol after adding 3 volumes of TE to the band. Next, 2.5 vol. EtOH was added, and the material was precipitated at −20° C. for 2 hours. The resultant DNA precipitate is used as a DNA template.

[0735] Transfection of B16F10 Melanoma Cells

[0736] G418 sensitivity: B16F10 melanoma cells (B16s) were first tested for sensitivity to G418 which will be used as the selectable marker. At 400 ug/mL G418, B16s did not survive, while 200 and 300 ug/mL allowed some survival.

[0737] Transfection

[0738] Lipofectamine was used to produce stably transfected B16s. The conditions for transfection were those described protocol provided by Life Technologies. B16s were plated at 4×105 cells/well in 6 well plates, using Murine Complete Medium (MCM) described in Report 2. Cells were cultured overnight. Optimal density is 50-80% confluent and is usually achieved by 18-24 after seeding at 1-3×105 cells/well. DNA sources consisted of SEB-G418 resistance containing vector, vector DNA with G418 resistance gene only, and control DNA from PSK401 (no G418 resistance marker). DNA concentrations were determined for the SEB containing and control vectors.

| DNA source | A260 | DNA (ug/ml) |
|---|---|---|
| SEB | 0.09 | 0.45 |
| Vector only | 0.13 | 0.65 |
| PSK 401 | 0.15 | 0.75 |

[0739] Lipofectamine solutions and DNA solutions were prepared in 12×75 mm tubes, using OPTI-MEM (Life Technologies 31985). DNA solutions contained approximately 2 ug in 100 uL OPTI-MEM; the LIPOFECTAMINE Reagent was diluted by adding 6 or 12 uL to OPTI-MEM at a final volume of 100 uL. The solutions were mixed and held at room temperature for 30 minutes. Specific DNA and Lipofectamine conditions were as follows: Plated cells were rinsed once with 2 ml/well OPTI-MEM. To the above tubes, 0.8 mL OPTI-MEM. This mixture was then overlayed onto the washed cell monolayers according to the above well designations. Cells were incubated for 5 hours at 37° C. in 5% CO2. Murine Complete Medium with 20% FBS but no antibiotics was then added at 1 ml/well. Cultures were refed with standard MCM, at 3 mL/well, after 24 hours. Three days after transfection, cells from each transfection condition were subcultured by splitting the total cell suspension 90:10 into 150 mm plates (one plate received 90% of the cell suspension, the other received the remaining 10%).

[0740] G418 Selection frozen stocks of secondary clones were prepared after 9 days. Tertiary clones were refed after 3 days in culture and subcultured after 7 days in culture. Plates were harvested, cells were resuspended in a total of 1 mL, and replated by addition of 100 uL of the cell suspension to 100 mm plates with 15 mL MCM or 100 uL/well in a 96 well plate. Frozen stocks of tertiary clones were prepared.

[0741] Generation of Conditioned Medium for Assay of Supernatents

[0742] After 7 days, 100 mm plates of tertiary clones were again replated. This time, cell counts were performed and 4.5×10⁵ cells were plated in 12 well plates, one well/clone. The remaining cell suspension was frozen and stored at −80° C. After 4 days in culture, supernatents were harvested, stored at 4° C., and the cells were replated into 100 mm plates. Supernatents were obtained from the 100 mm plates after 7 days in culture. See Detection of positive clones. Frozen stocks were also generated from these plates.

Development of ELISA with HRP Rabbit anti-SEB.

Final ELISA conditions were as follows:

| | |
|---|---|
| Assay Plate | ProBind (Falcon #3915) |
| Capture Antibody | Rabbit anti-SEB (Toxin Technologies # LBI202), 10 |
| | ug/mL in PBS, 50 uL/well, 1 hr, RT |
| Wash | 3X with 0.1% casein, 0.1% Tween 20 in PBS |
| Blocking | 1% casein in PBS, 250 uL/well, overnight, 4oC |
| Antigen | Supernatant used neat or SEB diluted in PBS, 50 |
| | uL/well, 2 hr, RT |
| Wash | As above |
| Primary Ab | HRP Rabbit anti-SEB (Toxin Technologies # |
| | LBC202), 1/300 in block buffer, 50 uL/well, 2 hr, RT |
| Substrate | OPD, 2.5 mg/mL in citrate buffer, pH 5.0, 0.03% |
| | H₂O₂, 100 ul/well, 15 min, RT |
| Stop | 4 M H₂SO₄, 100 uL/well |
| Read-out | OD 490 nm |

[0743] Results: SEB produced a dose response curve (linear range 60 fg -60 pg/mL) and the background was very low. Vector only clones produced only background signals. One SEB transfected clone produced a strong signal, three produced moderate signals, and one other produced a weak but definite signal. OD 490 nm

[0744] All plates were refed at 6 days after transfection with medium containing 400 ug/mL G418. Plates were refed every 2 to 3 days with G418 containing medium until day 17 after transfection. No growth was observed in wells 1-4 as expected. Plates initiated with 90% of the cell suspension and showing growth were harvested, frozen, and stored at −80° C.

[0745] Primary Subcloning

[0746] Ten colonies were selected from each well for wells 5, 7, 9, and 11. Subcloning was accomplished by the use of cloning cylinders as follows: After seating the cylinder, medium was aspirated and the isolated colony was washed once with 100 uL of warmed trypsin-EDTA. This was aspirated and replaced with fresh tyrpsin-EDTA. After incubation at 37° C. for 2 minutes, the cells were recovered by trituration and transferred to a tube containing 1 ml MCM, then replated by addition of 20 uL of cell suspension to 15 mL MCM with G418 in 150 mm plates. The remaining cell suspension was plated into 24 well plates, 4 wells/clone and all plates were maintained at 37° C., 5% CO2. The 6 well plates were used to assess SEB expression on the cell surface as desribed under Detection of positive clones.

[0747] Secondary and Tertiary Subcloning and Preparation of Frozen Stocks

[0748] These and all subsequent procedures were performed by me. Secondary subcloning was performed as above at 7 days after initiation of primary subclones. One colony/plate was selected for further subcloning (a total of 40 colonies) The cell suspension was prepared in a total volume of 1 mL; 100 uL was replated into 100 mm plates containing 10 mL MCM with G418. The remaining cell suspension was plated in 96 well plates at 100/well, 2 replicates for assay. The 96 well plate was used for detection of intracellular expression of SEB desribed under Detection of positive clones. Primary subcloning plates were cultured one additional day, then harvested, frozen, and stored at −80° C. These frozen stocks are designated primary subclones. Secondary subclones were refed after 4 days. Of 40 secondary clones, 36 regrew. Tertiary subcloning was performed after 8 days and

| | SEB+ | | | Vector only | | |
|---|---|---|---|---|---|---|
| | 1 | 2 | mean | 1 | 2 | mean |
| 9.1 | 0.097 | 0.112 | 0.104 | 0.079 | 0.102 | 0.091 |
| 9.2 | 0.127 | 0.123 | 0.125 | 0.081 | 0.076 | 0.078 |
| 9.3 | 0.109 | 0.104 | 0.106 | 0.087 | 0.070 | 0.079 |
| 9.4 | 0.444 | 0.393 | 0.418 | 0.077 | 0.077 | 0.077 |
| 9.5 | 0.163 | 0.087 | 0.125 | 0.075 | 0.074 | 0.074 |
| 9.6 | 0.516 | 0.522 | 0.519 | 0.066 | 0.064 | 0.065 |
| 9.7 | 0.087 | 0.091 | 0.089 | 0.096 | 0.084 | 0.090 |
| 9.8 | 0.386 | 0.450 | 0.418 | 0.080 | 0.071 | 0.075 |
| 9.9 | 0.137 | 0.122 | 0.130 | 0.071 | 0.070 | 0.071 |
| 11.1 | 0.083 | 0.075 | 0.079 | 0.068 | 0.078 | 0.073 |
| 11.2 | 1.847 | 1.802 | 1.824 | 0.063 | 0.076 | 0.070 |
| 11.3 | 0.071 | 0.077 | 0.074 | 0.076 | 0.074 | 0.075 |
| 11.4 | 0.087 | 0.084 | 0.086 | 0.083 | 0.085 | 0.084 |
| 11.5 | 0.161 | 0.220 | 0.191 | 0.092 | 0.086 | 0.089 |
| 11.8 | 0.221 | 0.100 | 0.160 | 0.080 | 0.081 | 0.080 |
| 11.9 | 0.080 | 0.091 | 0.085 | 0.077 | 0.072 | 0.074 |
| 11.10 | 0.290 | 0.254 | 0.272 | 0.081 | 0.112 | 0.097 |
| 11.10 | 0.268 | 0.263 | 0.265 | 0.093 | 0.114 | 0.103 |

[0749] Based on the the SEB standard curve, the following concentrations were derived.

| Clone number(pg/ml) | SEB |
|---|---|
| 11.2 | 4.146 |
| 9.6 | 0.152 |
| 9.4 | 0.118 |
| 9.8 | 0.118 |
| 11.10 | 0.081 |

[0750] Cells are transfected ex vivo or in vivo and implanted in a cancer-bearing host. These transfected cells are also used to stimulate host lymphocytes ex vivo. Once activated, the lymphocytes are administered to the host. The ex vivo or in vitro introduction of DNA into cells is accomplished by methods that (1) form DNA precipitates which are internalized by the target cell; (2) create DNA-containing complexes with charge characteristics that are compatible with DNA uptake by a target cell; or (3) result in the transient formation of pores in the plasma membrane of a target cell exposed to an electric pulse (these pores are of sufficient size to allow DNA to enter the target cell).

[0751] Generally, two factors determine the method used: the duration of expression required (i.e., transient versus stable expression) and the type of cell to be transfected. The specific details of exemplary procedures are described herein. Transfections are carried out by well established methods including calcium phosphate precipitations, DEAE Dextran transfection, and electroporation.

[0752] Calcium Phosphate Precipitation

[0753] A commonly used ex vivo and in vitro method to transfer DNA into recipient cells involves the co-precipitation of the DNA of interest with calcium phosphate. With this technique, DNA enters the cell in sufficient quantities such that the treated cells are transformed with relatively high frequency. Using a variety of cell types, transfection efficiencies of up to 10⁻³ have been obtained. This is the method of choice for the generation of stable transfectants.

[0754] Variations of the basic technique have been developed. If the transfection involves the transfer of plasmid DNA, then high molecular weight genomic DNA isolated from a defined cell or tissue source can be included. The addition of such DNA, called carrier DNA, often increases the efficiency of transfection by the plasmid DNA. Upon arrival of the plasmid DNA/carrier DNA/calcium phosphate co-precipitate to the nucleus of the treated cell, the plasmid DNA integrates into the carrier DNA, often in the tandem array, and this assembly of plasmid and carrier DNA, called a transgenome, subsequently integrates into the chromosome of the host cell.

[0755] Another procedural option is the addition of a chemical shock step to the transfection protocol. Either dimethylsulfoxide or glycerol are appropriate. The optimal concentrations and lengths of treatment vary according to cell type. The use of these agents dramatically affect cell viability and can be optimized as described elsewhere (Chen and Okayama, Mol. Cell. Biol. 7:2745 (1987)). Specifically, incubation of cells with the co-precipitate is optimal at 35° C. in 2-4% CO2 for 15-24 hours. In addition, circular DNA is more active than linear DNA and a finer precipitate is obtained when the DNA concentration is between 20-30 mg/ml in the precipitation mix.

[0756] It is noted that incubator temperature, CO2 concentration, and DNA concentration can be varied to obtain the desired result. In addition, the temperature and CO2 concentrations described below are not optimal for cell growth and should be maintained only temporarily.

[0757] Method

[0758] Day 1: 1.3×10⁶ cells are seeded per 100-mm dish. Cells are about 75% confluent when used to seed the dishes.

[0759] Day 2: A large calcium phosphate cocktail mixture to transfect many plates simultaneously is prepared. This protocol is given for 1 ml (or 1×100-mm dish equivalent) of solution. These amounts are scaled up as necessary, allowing for an appropriate amount of sample-transfer errors. Adherence to sterile technique is critical. Sterile reagents, tips, and tubes are used.

[0760] 1. Add 1-20 g DNA (1 mg/ml in sterile TE, 10 mM Tris-HCl 1 mM EDTA pH 7.05) to 0.45 ml sterile H₂O. Note: First “sterilize” DNA by ethanol precipitation with NaCl (0.1M final aqueous concentration) and 2×volume 200% ethanol.

[0761] 2. Add 0.5 ml 2×HEPES buffered saline. Mix well.

[0762] 3. Add 50 ml of 2.5 M CaCl₂, vortex immediately.

[0763] 4. Allow the DNA mixture to sit undisturbed for 15-30 minutes at room temperature.

[0764] 5. Add 1 ml of the DNA transfection cocktail directly to the medium in the 100-mm dish (plated with cells on day 1).

[0765] 6. Incubate the dishes containing the DNA precipitate for 16 hours at 37° C. Remove the media containing the precipitate and add fresh complete growth media.

[0766] 7. Allow the cells to incubate for 24 hours. Post-incubation, the cultures can be split for subsequent selection. Split cultures 1:5; however, to isolate individual colonies for further analysis, split cultures 1:10 and 1:100.

[0767] DEAE Dextran Transfection

[0768] Typically, DEAE dextran transfection is used to transiently transfect cells in culture. This method is highly efficient and the DNA/DEAE dextran mixture used for transfection is relatively easy to prepare. For example, this method yields transfection efficiencies of as high as 80 percent. DNA introduced into cells with this method, however, appears to undergo mutations at a higher rate than that observed with calcium phosphate-mediated transfection.

[0769] Method

[0770] Briefly, a DEAE dextran mixture is prepared and the DNA sample of interest is added, mixed, and then transferred to the cells in culture.

[0771] Day 1: Cells are seeded at a concentration of 2×10⁴ cells/cm2 in a total volume of 2 ml/well (1.92×10⁵ cells/well of a six-well cluster dish). Cells should be about 75% confluent when used to seed the dishes.

[0772] Day 2: Resuspend 0.5 ml DEAE Dextran in Tris-buffered saline (TBS).

[0773] Final DEAE Dextran concentration should be about 0.04%. Observe cell monolayers microscopically. Cells should appear about 60-70% confluent and well distributed. Bring all reagents to room temperature. Aspirate off growth media and wash monolayer once with 3 ml of phosphate buffered saline (PBS), followed by one wash with 3 ml of TBS. Aspirate off TBS solution and add 100-125 ml of the appropriate DNA/DEAE-Dextran/TBS mixture to the wells. Incubate dishes at room temperature inside a laminar flow hood. Rock the dishes every 5 minutes for 1 hour, making sure the DNA solution covers the cells. After the 1-hour incubation period, aspirate off the DNA solution and wash once with 3 ml of TBS followed by 3 ml of PBS. Remove the PBS solution by aspiration and replace with 2 ml of complete growth media containing 100 M chloroquine. Incubate the dishes in an incubator set at 37° C. and 5% CO2 for 4 hours. Remove the media containing chloroquine and replace with 2-3 ml of complete growth media (no chloroquine). Incubate the transfected cells for 1-3 days, after which the cells will be ready for analysis. The exact incubation period depends on the intent of the transfection. Optimal expression typically occurs at 3 days post-transfection.

[0774] Electroporation

[0775] Electroporation is a process whereby cells in suspension are mixed with the DNA to be transferred. This cell/DNA mixture is subsequently exposed to a high-voltage electric field. This creates pores in the membranes of treated cells that are large enough to allow the passage of macromolecules such as DNA into the cells. Such DNA molecules are ultimately transported to the nucleus and a subset of these molecules are integrated into the host genome. The reclosing of the membrane pores is both time and temperature dependent and thus is delayed by incubation at 0° C., thereby increasing the probability that the molecule of interest will enter the cell.

[0776] Electroporation appears to work on virtually every cell type. With this technique, the efficiency of nucleic acid transfer is high for both transient transfection and stable transfection. One important technical difference between electroporation and other competing technologies is that the number of input cells required for electroporation is considerably higher.

[0777] Method

[0778] 1. Harvest exponentially growing cells such as tumor cells or accessory cells by trypsinization, pellet, and wash twice with electroporation buffer (Kriegler, M. Gene Transfer and Expression, W. H. Freeman and Co., New York, N.Y. (1991)).

[0779] 2. Resuspend cells in electroporation buffer at a concentration of 2-20×10⁶ cells/ml in an electroporation cuvette.

[0780] 3. Add 5-25 mg of DNA that has been linearized to the cell suspension

[0781] 4. Insert or connect the electroporation electrode according to the manufacturer's instructions and subject cell/DNA mixture to an electric field (pulse).

[0782] 5. Return cell/DNA mixture to ice and incubate for 5 minutes.

[0783] 6. Plate cells in non-selective medium. Biochemical selection may be carried out 24-48 hours later.

[0784] Lipofectamine

[0785] In vitro cell transfections can be done in 12-well plates, using 3.0 g plasmid DNA and Lipofectamine (GIBCO BRL), at 37° C. for 4 hours. After transfection, the cells are cultured in 2.0 ml complete medium for 48 hours and the cells are harvested. The cells are then washed in PBS. Stably transfected Chinese hamster ovary (CHO) and B16 lines are isolated by selection in 1.0 mg/ml G418 (GIBCO BRL). Cells are grown and passaged in medium containing G418 for 3-4 weeks Mock transfected cell lines (cells transfected with vector only) are used as controls.

[0786] Viral Vectors

[0787] Recombinant viral vectors containing the nucleic acid of interest can also be used to introduce nucleic acid into a cell ex vivo or in vitro. It is noted that viral vectors are also used to transfect cells in vivo. These viral vectors can be DNA viruses such as herpesviruses, adenoviruses, and vaccinia viruses or RNA viruses such as retroviruses. The method and materials required to produce and use these viral vectors ex vivo, in vitro, and in vivo are commonly known in the art and are used in the invention described herein (Sambrook, J. et al., supra).

[0788] Selection

[0789] Regardless of the method used to transfect a particular cell type, stably transfected cells are identified as follows. The DNA of interest contains a selectable marker. Typically, a selectable marker encodes a polypeptide that confers drug resistance and the DNA containing this resistance conferring nucleic acid is transfected into the recipient cell. Post transfection, the treated cells are allowed to grow for a period of time (24-48) hours to allow for efficient expression of the selectable marker. After an appropriate incubation time, transfected cells are treated with media containing the concentration of drug appropriate for the selective survival and expansion of the transfected and now drug resistant cells.

[0790] Many drug as well as non-drug selection methods are known in the art and can be used in the invention described herein. For example, a detailed description of currently available drug selection strategies is provided in Kriegler M., Gene Transfer and Expression, A Laboratory Manual, W. H. Freeman and Co. New York, N.Y. pp. 103-107 (1991).

[0791] General Method

[0792] Sixteen hours after transfection, the transfected/infected cells are fed with fresh, non-selective media. Twenty-four to forty-eight hours later, the cultures are split to a 1:5 or greater dilution and plated in drug-containing media. It is noted that cells are not placed in drug-containing media immediately after transfection in order to allow a sufficient amount of time for the drug resistance nucleic acid to be expressed and thus confer the drug resistant phenotype. Cell cultures are re-fed with drug-containing media every three days, at which time cultures are examined under a microscope to determine the efficiency of drug selection.

[0793] Site-Directed Mutagenesis by Polymerase Chain Reaction

[0794] Introduction of Restriction Endonuclease Sites by PCR

[0795] PCR is the preferred method for introducing any desired sequence change into the DNA.

[0796] The basic protocol is as follows:

[0797] Materials

[0798] DNA sample to be mutagenized, pUC19 plasmid b vector or similar high-copy number plasmid having M13 flanking primer

[0799] 500 ng/ml (100 pM/ml) flanking sequence primers incorporating the restriction enzyme site TE buffer

[0800] 10×amplification buffer

[0801] 2 mM 4dNTP mix

[0802] 500 ng/ml (100 pM/ml) M13 flanking sequence primers: forward (NEB) and reverse (NEB)

[0803] 5 U/ml Taq DNA polymerase

[0804] Mineral oil

[0805] Chloroform

[0806] Buffered phenol

[0807] 100% ethanol

[0808] Appropriate restriction endonucleases

[0809] 500 ml microcentrifuge tube

[0810] Automated thermal cycler

[0811] 1. Subclone DNA to be mutagenized into high-copy number vector using restriction sites flanking the area to be mutated.

[0812] 2. Prepare template DNA by plasmid miniprep. Resuspend 100 ng in TE buffer to 1 ng/ml final.

[0813] 3. Synthesize oligonucleotide primers and purify by denaturing polyacrylamide gel electrophoresis. Resuspend oligonucleotides in 500 l TE buffer. Determine absorbance at A260 and adjust to 500 ng/ml.

[0814] 4. Combine the following in each of two 500 l microcentrifuge tubes, adding oligonucleotides 1 and 2 to separate tubes:

[0815] 10 ml (10 ng) template DNA

[0816] 10 ml 10×amplification buffer

[0817] 10 ml 2mM 4dNTP mix

[0818] 1 ml (500 ng) oligonucleotide 1 or 2 (100 pM final)

[0819] 1 ml (500 ng) appropriate M 13 flanking sequence primer, forward or reverse (100 pM final).

[0820] H2O to 99.5 ml

[0821] 0.5 ml Taq DNA polymerase (5U/ml)

[0822] Overlay reaction with 100 ml mineral oil.

[0823] 5. Carry out PCR in an automated thermal cycler for 20 to 25 cycles under the following conditions:

[0824] 45 sec 93° C.

[0825] 2 min 50° C.

[0826] 2 min 72° C.

[0827] After last cycle, extend for an additional 10 min at 72° C.

[0828] 6. Analyze 41 by nondenaturing agarose or occurrence gel electrophoresis to verify that the amplification has yielded the predicted product.

[0829] 7. Remove mineral oil and extract once with chloroform to remove remaining oil.

[0830] Extract with buffered phenol and concentrate by precipitation with 100% ethanol.

[0831] 8. Digest half the amplified DNA with the restriction endonucleases for the flanking and introduced sites. Purify digested fragments on a low gelling/melting agarose gel.

[0832] 9. Ligate and subclone both fragments into an appropriately digested vector to obtain a recombinant plasmid containing a single DNA fragment incorporating the new restriction site.

[0833] 10. Transform plasmid into E. coli. Prepare DNA by plasmid miniprep.

[0834] 11. Analyze amplified fragment portion of plasmid by DNA sequencing to confirm the addition of the mutation.

[0835] Introduction of Point Mutation by PCR

[0836] Materials

[0837] DNA sample to be mutagenized

[0838] Oligonucleotide primers incorporating the point mutation

[0839] Klenow fragment of E. coli DNA polymerase I

[0840] Appropriate restriction endonuclease

[0841] Procedure

[0842] 1. Prepare template DNA (steps 1 and 2 of Basic Protocol).

[0843] 2. Synthesize and purify oligonucleotide primers (3 and 4).

[0844] 3. Amplify template DNA (steps 4 and 5 of Basic Protocol 1). After final extension step, add 5 U Klenow fragment and incubate 15 min at 30° C.).

[0845] 4. Analyze and process reaction (steps 6 and 7 of Basic Protocol).

[0846] 5. Digest half the amplified fragments with the restriction endonucleases for the flanking sequences. Purify digested fragments on a low gelling/melting agarose gel.

[0847] 6. Subclone the two amplified fragments into an appropriately digested vector by blunt-end ligation.

[0848] 7. Carry out steps 10 and 11 of Basic Protocol.

[0849] Introduction of a Point Mutation by Sequential PCR

[0850] Steps

[0851] 1. Prepare the template DNA (steps 1 and 2 of Basic Protocol 1).

[0852] 2. Synthesize and purify the oligosaccharide primers (5 and 6).

[0853] 3. Amplify the template and generate blunt-end fragments (step 3 of Basic Protocol).

[0854] 4. Purify fragments by nondenaturing agarose gel electrophoresis. Resuspend in TE buffer at 1 mg/ml.

[0855] 5. Combine the following in 500 ml microcentrifuge tube:

[0856] 10 ml (10 ng) each amplified fragment

[0857] 1 ml ( 500 ng) each flanking sequence primer (each 100 pM final)

[0858] 10 ml 10×amplification buffer

[0859] 10 ml 2 mM 4dNTP mix

[0860] 0.5 ml Taq DNA polymerase (5 U/ml)

[0861] Overlay with 100 ml mineral oil.

[0862] 6. Carry out PCR for 20 to 25 cycles (step 5 of Basic Protocol 1). Analyze and process the reaction mix (steps 6 and 7 of Basic Protocol 1).

[0863] 7. Digest cDNA fragment with appropriate restriction endonuclease for the flanking sites. Purify fragment on a low gelling/melting agarose gel. Subclone into an appropriately digested vector.

[0864] 8. Carry out steps 10 and 11, Basic Protocol 1.

[0865] Genomic Targeting and Genetic Conversion in Cancer Therapy

[0866] A number of cellular transformations are due, in large part, to a single base mutation that alters the function of the expressed protein. Alterations in the DNA sequence of a gene involved in cell proliferation can have a significant effect on the viability of particular cells. Thus, the capacity to modulate the base sequence of such a gene would be a useful tool for cancer therapeutics. An experimental strategy that centers around site-specific DNA base mutation or correction using a unique chimeric oligonucleotide has been developed. This chimeric molecule has demonstrated higher recombinogenic activities than identical oligonucleotides containing only DNA residues, both in vitro and in vivo. The chimeric molecule is designed to hybridize to a target site within the genome and induce a single base mismatch at the residue targeted for mutation. The DNA structure created at this site is recognized by the host cell's repair system which mediates the correction reaction. For example, the bcr-abl fusion gene, the product of a translocation between human chromosomes 9 and 22, and the cause of chronic myelogenous leukemia (CML) can be targeted for gene correction. Fusion genes or mutations which abound in cancer cells are excellent targets for correction especially if (1) they are unique and are recognized by the immune system as dominant or subdominant epitopes, (2) they are a single copy target; (3) the DNA sequence of the fusion gene or mutation is unique. The goal of such experiments is to knock-out the fusion gene by changing an amino acid codon into a stop codon through a chimeric directed DNA repair system.

[0867] Targeted Gene Correction of Episomal DNA in Mammalian Cells Mediated by a Chimeric RNA/DNA Oligonucleotide

[0868] An experimental strategy to facilitate correction of single-base mutations of episomal targets in mammalian cells has been developed. The method utilizes a chimeric oligonucleotide composed of a contiguous stretch of RNA and DNA residues in a duplex conformation with double hairpin caps on the ends. The RNA/DNA sequence is designed to align with the sequence of the mutant locus and to contain the desired nucleotide change. Activity of the chimeric molecule in targeted correction is used in a with the aim of correcting a point mutation in the gene encoding the human liver/bone/kidney alkaline phosphatase. When the chimeric molecule is introduced into cells containing the mutant gene on an extrachromosomal plasmid, correction of the point mutation is accomplished with a frequency approaching 30%. These results extend the usefulness of the oligonucleotide-based gene targeting approaches by increasing specific targeting frequency.

[0869] The site directed mutagenesis is used to carry out using the chimeric DNA/RNA structure which enables the construct to target tumor cells in vivo and in vitro. Such targeting structures include target seeking moieties and can in principle be any structure that is able to bind to a cell surface structure or that binds via biospecific affinity. The target seeking moiety is primarily a disease specific structure selected among hormones, antibodies, growth factors. The biospecific affinity counterpart may include interleukins (especially interleukin-2) antibodies (full length antibody, Fab, F(ab′2, Fv, single chain antibody and any other antigen binding antibody fragments (such as Fab) directed to a cells surface epitope or more preferably towards the binding epitope for the a specific antibody. They may also include polypeptides binding to the constant domains of immunoglobulins (e.g., protein A and G and L), lectins, streptavidin, biotin etc.

[0870] The term antibodies comprises monoclonal as well as polyclonal preparations. The targeting moiety may also be directed toward unique structures on more or less healthy cells that regulate or control the development of a disease. or ligands for specific receptors on tumor cells). The targeting structure may be a nucleic acid, lipid or carbohydrate and variations thereof which target receptors on the diseased cell. The targeting is not confined to diseased cells but may include additional normal cells as well.

[0871] Synthesis and Purification of Oligonucleotides

[0872] The chimeric ogligonucleotides are synthesized on a 0.2-mol scale by using the 1000 Å-wide-pore CPG on the ABI 394 DNA/RNA synthesizer. The exocyclic amine groups of DNA phosphoramidites (Applied Biosystems) are protected with benzoyl for adenosine and cytidine and isobutyryl for guanosine. The 2′-O-methyl RNA phosphoramidites (Glen Research, Sterling, Va.) are protected with a phenoxyacetyl group for adenosine, dimethylformamide for guanosine and an isobutyryl group for cytidine. After the synthesis is complete, the base-protecting groups are removed by heating in ethanol/concentrated ammonium hydroxide, 1:3 (vol/vol), for 20 h at 55° C. The crude oligonucleotides are purified by polyacrylamide gel electrophoresis. The entire oligonucleotide sample is mixed with 7 M urea/10% (vol/vol) glycerol, heated to 70° C., and loaded on a 10% polyacrylamide gel containing 7 M urea. After gel electrophoresis, DNA is visualized by UV shadowing, dissected from the gel, crushed, and eluted overnight in TE buffer (10 mM Tris-HCl/l mM EDTA, pH 7.5) with shaking. The eluent containing gel pieces are centrifuged through 0.45-um (pore size) spin filter (Millipore) and precipitated with ethanol. Samples are further desalted with a G-25 spin column (Boerhinger Mannheim) and greater than 95% of the purified oligonucleotides are found to be full length.

[0873] Transient Transfection and Measurements of Activity

[0874] CHO cells were maintained in Dulbecco's modified Eagle's medium (DMEM) (BRL) containing 10% (vol/vol) fetal bovine serum (FBS; BRL). Transient transfection is carried out by addition of 10 g of the plasmid with 10 g of Lipofectin in 1 ml of Optimem (BRL) to 2×10⁵ CHO cells in a 6-well plate. After 6 h. various amounts of oligonucleotide is mixed with 10 g of Lipofectin in 1 ml of Optimem and added to each well. After 18 h, the medium is aspirated and 2 ml of DMEM containing 10% FBS was added to each well. Histochemical staining was carried out (19), 24 h after transfection of the oligonucleotide. Spectrophotometric measurements are carried out by the ELISA amplification system (BRL). Transfection is carried out in triplicate in a 96-well plate. The amounts of reagents and cells are 10% of that used for the 6-well plate. Cells were washed three times with 0.15M NaCl and lysed in 100 ml of buffer containing 10 mM NaCl, 0.5 Nonidet P-40, 3 mM MgCl2, and 10 mM Tris-HCl (pH 7.5), 24 h after transfection with chimeric oligonucleotides. A fraction of cell lysates (20 ml) incubated with 50 l of ELISA substrate and 50 ml of ELISA amplifier (BRL), the reaction is stopped by addition of 50 ml of 0.3 M H2S04 after 5 min of incubation with amplifier. The extent of reaction is carried out within the linear range of the detection method. The absorbance is read by an ELISA plate reader (BRL) at a wavelength of 490 nm.

[0875] Hirt DNA Isolation Colony Hybridization, and Direct DNA Sequencing of PCR Fragments

[0876] The cells are harvested for vector DNA isolation by a modified alkaline lysis procedure, 24 h after transfection with the chimeric oligonucleotide. Hirt DNA is transformed into Escherichia coli DH5a cells (BRL). Colonies from Hirt DNA are screened for specific hybridization for each probe designed to distinguish the point mutation. Colonies were grown on ampicillin plates, lifted onto nitrocellulose filter paper in duplicates, and processed for colony hybridization. The blots were hybridized to ³²P-end-labeled oligonucleotide probes at 37° C. in a solution containing 5×Denhardt's solution, 1% SDS, 2×SSC, and denatured salmon sperm DNA (100 mg/ml). Blots were washed at 52° C. in TMAC solution (3.0 M tetraethylammonium chloride/50 mM Tris-HCl, pH 8.0/2 mM EDTA/0.1% SDS). Plasmid DNA was made from 20 colonies shown to hybridize to either of the probes by using the Qiagen miniprep kit (Chatsworth. Calif.). Several hundred bases flanking key positions of each plasmid are sequenced in both directions by automatic sequencing (ABI 373A, Applied Biosystems). A 192-bp PCR-amplified fragment are generated by Vent polymerase (New England Biolabs. MA), utilizing primers corresponding to positions of the known cDNA flanking position. The fragment is gel-purified and subjected to automatic DNA sequencing (ABI 373A, Applied Biosystems).

[0877] Oligonucleotide Synthesis

[0878] Chimeric RNA/DNA oligonucleotides for both transcribed and nontranscribed factor IX were synthesized by Applied Biosystems, Inc. (Foster City, Calif.) as previously described. The oligonucleotides are prepared with DNA and 2-O-methyl RNA phosphoramidite nucleoside monomers on an ABI 394 DNA/RNA synthesizer, purified by HPLC and quantified by UV absorbance. More than 95% of the purified oligonucleotides are determined to be full length.

[0879] Cell Isolation and Transfections

[0880] Cells are isolated, by a two-step collagenase perfusion as previously described. The purified cells are plated on Primaria plates (Becton Dickinson, Franklin Lakes, N.J.) at a density of 4×10⁶ cells per 35-mm dish and maintained in supplemented William's E medium. Eighteen hours after plating, the cells are washed and transfected with the chimeric molecules complexed to polyethylenimine (PEI). A pH 7.0, 10 mM stock solution of PEI (800 kDa) (Fluka Chemical Corp., Ronkonkoma, N.Y.) is prepared. Briefly, the chimeric oligonucleotides are complexed with 10 mM PEI at 9 equivalents of PEI nitrogen per chimeric phosphate in 100 l of 0.15 M NaCl and transfected in 1 ml of medium at final concentrations of 150, 300 or 450 nM. PEI is lactosylated by coupling lactose to 30% of the nitrogen amines using sodium cyanoborohydride (Sigma Chemical Company, St. Louis, Mo.). Cells are also transfected with 100 l of 0.15 M NaCl containing the lactosylated 800-kDa and 25-kDa PEI chimeric complexes (Sigma) at final concentrations of 90, 180 or 270 mM. After 18 h, an additional 2 ml of medium is added to the transfected cultures for the remaining 6 or 30 h of incubation. Vehicle control transfections utilize the same amount of PEI, but substituted an equal volume of 10 mM Tris-HCl, pH 7.6, for the oligonucleotides.

[0881] DNA/RNA Isolation and Cloning

[0882] The cells were harvested by scraping 48 h after transfection. Genomic DNA larger than 100-150 base pairs was isolated using the highly pure PCR template preparation kit (Boehringer Mannheim, Indianapolis, Ind.). RNA was isolated using RNAzoI 8 (Tel-Test, Inc., Friendswood, Tex.), according to the manufacturer's protocol. PCR amplification of a fragment of the gene in question gene is performed with 300 ng of the isolated DNA from either the primary cell culture.

[0883] The primers were designed (Oligos Etc., Wilsonville, Oreg.) corresponding to nucleotides to cDNA to be corrected. Primer annealing is carried out at 59° C., and the samples are amplified for 30 cycles using Expand Hi-fidelity polymerase (Boehringer Mannheim). To rule out PCR artifacts, 300 ng of control DNA is incubated with 0.5, 1.0 and 1.5 g of the oligonucleotide before the PCR-amplification reaction. Additionally, 1.0 g of the chimeric alone is used as the “template” for the PCR amplification.

[0884] RT-PCR amplification is done utilizing the Titian one tube RT-PCR system (Boehringer Mannheim) according to the manufacturer's protocol and by using the same primers as those used for the DNA PCR amplification. To rule out DNA contamination, the RNA samples are treated with RQ1 DNase-free RNase (Promega Corp., Madison, Wis.) and RT-PCR negative controls of RNased RNA samples were performed in parallel with the RT-PCR reaction. Each of the PCR reactions is ligated into the TA cloning vector pCR 2.1 (Invitrogen, San Diego, Calif.) and transformed into frozen competent E. coli.

[0885] Nuclear Uptake of the Chimeric Molecules

[0886] Nuclear localization of fluorescently labeled chimeric oligonucleotides was determined in the isolated cells. For in vivo studies, 250 l saline containing 75 g of fluorescently labeled chimeric oligonucleotides complexed to PEI is injected directly into the exposed caudate lobe. The animals are killed 24 h post injection, the tumor targeted is removed, bisected longitudinally, embedded using OCT and frozen cryosections were cut ˜10 pm thick, fixed, processed and examined using a MRC1000 confocal microscope (Bio-Rad, Inc., Hercules, Calif.).

[0887] In vivo Delivery of the Chimeric Oligonucleotides

[0888] Vehicle controls and lactosylated 25-kDa PEI at a ratio of 6 equivalents of PEI nitrogen per chimeric phosphate are prepared in 300 l of 5% dextrose. The aliquots are administered either as a single dose of 100 g or divided doses of 150 g and 200 g on consecutive days. Five days post injection, tumor tissue is removed for DNA and RNA isolation. DNA is isolated. RNA is isolated for RT-PCR amplification of the same region as the genomic DNA using RNAexol and RNAmate (Intermountain Scientific Corp., Kaysville, Utah) according to the manufacturer's protocol.

[0889] Colony Hybridization and Sequencing

[0890] Eighteen to 20 h after plating, the colonies were lifted onto MSI MagnaGraph nylon filters (Micron Separations, Inc., Westboro, Mass.), replicated and processed for hybridization according to the manufacturer's recommendation. The filters were hybridized for 24 h with 32P-end-labeled oligonucleotide probes (Life Technologies, Inc., Gaithersburg, Md.), where the underlined nucleotide is the target of mutagenesis. Hybridizations are performed at 37° C., and the filters are processed following hybridization for autoradiography. Plasmid DNA isolated from colonies identified as hybridizing with the 32P-labeled probes is subjected to automatic sequencing using the forward and reverse primers, as well as gene specific primer corresponding to nucleotides of the normal gene.

### EXAMPLE 2

[0891] Cells Transfected with Nucleic Acids Encoding SAgs

[0892] Cultured VX-2 carcinoma cells were shown to retain their tumorigenic activity after implantation into New Zealand white rabbits. Progressive tumor outgrowth was observed over a 3 week period. Nucleic acid encoding SEB isolated and characterized by Gaskill et al, J. Biol. Chem. 263:6276 (1988) and Ranelli et al., Proc. Natl. Acad. Sci. USA 82:5850 (1985) were used to transfect tissue cultured VX-2 carcinoma cells using transfection methodology described in Example 1. Transfectants were selected using G418 and the survival of SEB-transfected VX-2 carcinoma cells was observed. In additional experiments, attempts were made to transfect murine 205 and 207 tumor cells with nucleic acid encoding SEB (the kind gift from Dr. Saleem Khan) and Streptococcal pyrogenic exotoxin A (the kind gift of Dr. Joseph Ferretti). Successful transfection of murine MCA 205 and B16 cells by nucleic acids encoding SEA and SEC2 was achieved shortly thereafter by integrating the SAg DNA into several retroviral vectors (MFG NEO) containing a growth hormone leader sequence under the control of a chick B-actin promoter (Krause J C et al., J. Hematotherapy 6: 41-51 (1997)). In addition, murine tumors MCA 205 fibrosarcoma cells and a spontaneous mammary carcinoma cells were successfully transfected with nucleic acids encoding SEB (provided by Dr. Saleem Khan) using the b-actin promoter. Transfected mammary carcinoma cells induced T cell proliferation in vitro. To demonstrate the anti-tumor capacity of tumor cells transfected with nucleic acid encoding a SAg, these transfectants were injected i.p. into syngeneic hosts with established mammary carcinomas. These transfectants demonstrated a capacity to reduce micrometastases of wild type mammary tumor in vivo assessed in a clonogenic lung metastases assay. The anti-tumor effect produced by the SEB transfectants was enhanced significantly by the co-administration of tumor cells transfected with nucleic acids encoding the costimulating molecule B7-1.

### EXAMPLE 3

[0893] Naked SAg DNA and Cells Co-transfected With SAg DNA and With Additional Nucleic Acid Encoding Anti-Tumor Motifs or Products

[0894] Nucleic acids encoding a SAg are injected in naked or plasmid form into a host with cancer as a means of activating T cells and initiating an anti-tumor response. They may also be used as a vaccine to prevent the occurrence or recurrence of tumor in a host. Under circumstances where it is desirable to activate CD4 cells to produce a TH-1 cytokine response the nucleic acid construct used to transfect cells contains immunostimulatory sequences such as unmethylated CpG sequences. Nucleic acids encoding SAgs may be co transfected into tumor cells together with nucleic acid encoding other constituents capable of promoting an anti-tumor response. A list of possible components of nucleic acid constructs for direct administration and/or transfection of tumor cells which are administered to the host is presented in Table II.

[0895] The nucleic acid construct or constructs are administered to a host intramuscularly, intradermally, systemically, parenterally, intratumorally, orally or locally (in the vicinity of the tumor). Alternatively, the construct is administered via a catheter or other devices known in the art into the tumor vasculature supplying all or part of a tumor. When the construct is injected systemically, the nucleic acid construct is directed to the tumor using an anti-tumor antibody or ligand specific for a tumor receptor or receptor on the tumor neovasculature or stroma. The antibody or ligand or other targeting structures are conjugated to the SAg nucleic acid construct in order to facilitate the introduction of the construct into tumor cells. Nucleic acid/polypeptide complexes or nucleic acid/viral complexes are used to target a specific receptor on the tumor vasculature or stroma.

TABLE II
Nucleic Acid Constructs and Cells

| Gene or Gene Product | Cells transformed | Reference or Source |
|---|---|---|
| 1. SAg. (SEQ ID NOS:67-68) | Tumor | [See text] |
| 2. Enterotoxin (SEQ ID NOS:7-16) | Tumor | [See text] |
| 3. SAg receptor (SEQ ID NOS:67-68) | Tumor | [See text] |
| 4. Enterotoxin receptor (SEQ ID NOS:7-16) | Tumor | [See text] |
| 5. CD1 receptor(s) (SEQ ID NOS:69-70) | Tumor | Martin LH et al., |
| | | Proc Natl. Acad. Sci. |
| | | 83:9154-9158 (1986) |
| 6. CD14 receptor (SEQ ID NOS:71-72) | Tumor | Ferrero, E et al., J. |
| | | Immunol. 145: 331-336 |
| | | (1990) |
| 7. CD44 encoding nucleic acids (SEQ ID NO:73) | T or NKT | Nottenburg, C et al. |
| | | Proc. Natl. Acad. Sci. |
| | | 86:8521-8525 (1989) |
| 8. Carbohydrate modifying enzymes(SEQ ID NO:74) | Tumor, T or NKT | Sheng, Y et al. Int. J. |
| | | Cancer 73: 850-858 |
| | | (1997) |
| 9. TCR V chain (SEQ ID NOS:75-76) | Tumor | Tillinghast, JP et al., |
| | | Science 233: 879-883 |
| | | (1986) |
| 10. Staph/Strep hyaluronidase (SEQ ID NOS:77-78) | Tumor | Hynes WL et al., |
| | | Infect. Immun., 63: 3015- |
| | | 3020 (1995) |
| 11. Staph/Strep erythrogenic toxin (SEQ ID NOS:79-80) | Tumor | McShan WM, et al., |
| | | Adv. Exp. Med. Biol. 418: |
| | | 971-973 (1997) |
| 12. Staphylococcal β-hemolysin (SEQ ID NOS:81-82) | Tumor | Projan SJ et al., |
| | | Nucleic Acid Res. |
| | | 3305-3309 (1989) |
| 13. Strep capsular polysaccharide (SEQ ID NOS:83-84) | Tumor | Lin, WS et al., J. |
| | | Bacteriol. 176: 7005- |
| | | 7016 (1994) |
| 14. Staph staphylocoagulase (SEQ ID NOS:85-86) | Tumor | Kaida S. et al., J. |
| | | Biochemistry 102: |
| | | 1177-1186 |
| | | (1987) |
| 15. Staph Protein A (SEQ ID NOS:87-88) | Tumor | Shuttleworth, HL et |
| | | al., Gene 58: 283-295 |
| | | (1987) |
| 16. Staph Protein A domain D (SEQ ID NOS:89-90) | Tumor | Roben, PW et at, J. |
| | | Immunol. 154: 6347- |
| | | 6445 (1995) |
| 17. Staph Protein A Domain B (SEQ ID NO:91) | Tumor | Gouda, H et al., |
| | | Biochemistry, 31: |
| | | 9665-9672 (1992) |
| 18. Immunostimulatory protein | Tumor, T or NKT | Tokunaga, T et al., |
| | | Microbiol. Immunol. 36: |
| | | 55-66, (1992) |
| 19. Costimulatory protein | Tumor | Entage, PC et at, |
| | | J.Immunol. 160: 2531- |
| | | 2538 (1998) |
| 20. SAg-mimicking nucleic acid | T or NKT | |
| 21. Glycophorin (SEQ ID NOS:92-93) | Tumor | Siebert, PD. et al., |
| | | Proc. Natl. Acad. Sci. |
| | | USA 83 1665-1669 |
| | | (1986) |
| 22. Mannose receptor (SEQ ID NOS:94-95) | Tumor | Kim SJ. et al., |
| | | Genomics 14: 721-727 |
| | | (1992) |
| 23. Angiostatin (SEQ ID NO:96) | Tumor | Cao, Y. et al., J.Clin. |
| | | Invest 101: 1055-1063 |
| | | (1998) |
| 24. Chemoattractant (SEQ ID NOS:97-98) | Tumor | Ames, RS. et al., J. |
| | | Biol. Chem. 271: 20231- |
| | | 20234 (1996) |
| 25. Chemokine (SEQ ID NOS:99-100) | Tumor | Nagira, M et at, J. |
| | | Biol. Chem. 272: 19518- |
| | | 19524 (1997) |
| 26. Transcription factor (SEQ ID NO:101) | Tumor, T or NKT | Schwab M et at, Mol. |
| | | Cell Biol. 6: 2752-2758 |
| | | (1986) |
| 27. Transcription factor-binding | Tumor, T or NKT | |
| nucleic acid | | |
| 28. SAg/peptide conjugate | Tumor | |
| 29. Glyco-SAg | Tumor | |
| 30. Staph. global regulator gene agr (SEQ ID NOS:102-104) | Tumor | Balaban, N. et al., |
| | | Proc. Natl. Acad. Sci. |
| | | USA 92: 1619-1623 |
| | | (1995) |
| 31. Lipid A biosynthetic (SEQ ID NOS:105-112) | Tumor | Schnaitman CA et al., |
| genes 1pxA-D | | Microbiological |
| | | Reviews 57: 655-682 |
| | | (1993) |
| 32. Mycobacterial mycolic acid (SEQ ID NOS:113-114) | Tumor | Fernandes ND et al., |
| | | Gene 170: 95-99 (1996); |
| | | Mathur M et al., J.Biol. |
| | | Chem. 267: 19388-19395 |
| | | (1992) |
| 33. c-abl oncogene amplified in (SEQ ID NOS:115-116) | Tumor | Scherle PA et al., |
| chronic myel. Leukemia | | Proc. Natl. Acad. Sci. |
| | | USA 87: 1908 (1990); |
| | | Heisterkamp N et. al., |
| | | Nature 344: 251-253 |
| | | (1990) |
| 34. erbB2 (HER2/neu) oncogene (SEQ ID NOS:117-118) | Tumor | Schechter AL et al., |
| | | Science 229: 976 (1985); |
| | | Bargmann CL Nature |
| | | 319: 22 (1986); Hung |
| | | MC et al., Proc. Natl. |
| | | Acad Sci. 83: 261 (1986); |
| | | Yamamoto T et al., |
| | | Nature 319: 230 (1986) |
| 35. IGF-1 receptor gene (SEQ ID NOS:119-120) | Tumor | Abbott AM et al., J. |
| | | Biol. Chem. 267: 10759- |
| | | 10763 (1992); Scott J et |
| | | al., Nature 317: 260-262 |
| | | (1985); Liu J et al., Cell |
| | | 75: 59-63 (1993) |
| 36. VEGF (SEQ ID NOS:121-122) | Tumor | Tischer E et al., J. |
| | | Biol. Chem. 266: 11947- |
| | | 11954 (1991) |
| 37. Strep emm-like gene family | Tumor | Kehoe MA, In: Cell- |
| | | Wall Associated Proteins |
| | | in Gram-Positive Bacteria |
| | | in Bacterial Cell Wall, |
| | | Ghuysen JM et at, eds, |
| | | Elsevier, Amsterdam, |
| | | 1994 |
| 38. iNOS (SEQ ID NOS:123-124) | Tumor | Xie QW et al., |
| | | Science 256: |
| | | 225-228 (1992) |
| 39. Apolipoproteins (e.g., Lp(a), | Tumor | [See Text] |
| apoB-100, apoB-48, apoE) (SEQ ID NOS:125-130) | | |
| 40. LDL & oxyLDL receptors | Tumor | [See Text] |
| (e.g., LDL oxyLDL, acetyl-LDL, | | |
| VLDL, LRP, CD36, SREC, LOX-1, | | |
| macrophage scavenger receptors) (SEQ ID NOS:131-142) | | |
| 41. Chemokine receptor (SEQ ID NOS:143-144) | Tumor/Accessory cells | [See Text] |

SAg-encoding DNA is used alone or together with DNA encoding other cell surface moieties useful in generating antitumor immunity. Genes or their products are shown in column 1, source information is shown in column 3, preferred cells to be transformed, transfected or transduced with the DNA are shown in column 2. All of references are incorporated by reference in their entirety.

[0896] Chemical Conjugation of SAg Nucleic Acids to VTs, Apolipoproteins, HPV Epitopes or Other Polypeptides/Proteins Listed in Tables I and II

[0897] The following section describes actual physical conjugates between poly- or oligonucleotides and peptides or proteins. SAg nucleic acid conjugates are prepared by chemical modification of nucleic acids at specific sites within individual nucleotides or within oligonucleotides such that a protein can be bound to a DNA or RNA polymer.

[0898] Derivatization may be accomplished through discrete sites on the available bases, sugars, or phosphate groups to create primary amines, sulfhydryls, carboxylates or phenolates. The chemical modification of nucleic acids can encompass several strategies. The initial derivatization may be the addition of a spacer arm to a particular reactive group on the nucleotide structure. Such a spacer typically contains a terminal functional group, such as an amine, that can be used to couple another molecule. The spacer may be used to react with a cross-linking agent, such as a heterobifunctional compound that can facilitate the conjugation of a protein or another molecule to the modified nucleotide. If enzymatic methods are used to incorporate a small spacer into an oligonucleotide, subsequent chemical conjugation steps still are needed to add the protein moiety. In some cases, if an oligonucleotide contains the appropriate functional group, a protein may be directly coupled using chemical methods. Many of the chemical derivatization methods employed in these strategies involve the use of an activation step that produces a reactive intermediary. The activated species then can be used to couple a molecule containing a nucleophile, typically a primary amine.

[0899] A preferred method is to amidate the 5′ PO4 of the oligonucleotide with EDC and then couple cystamine to the 5′ amidated oligonucleotide. EDC will add an amide to the oligonucleotide to form a phosphoramidate linkage. After the addition of cystamine the disulfide is reduced with an agent such as dithiothreitol (DTT) to produce a free 5′ sulfhydryl. The derivatized oligonucleotide is then coupled to a protein chain (e.g., a verotoxin A or B chain) that has been activated with a heterobifunctional cross-linker such as succinimidyl 4(N-maleidomethyl)cyclohexane 1-carboxylate (SMCC ) which reacts with the amines on the protein which then react with the sulfhydryls on the derivatized oligonucleotide. N-succinimidyl S-actylthioacetate (SATA) is useful for adding a free thiol or sulfhydryl group to a molecule lacking this moiety. With this modification, “protected” sulfhydryl is formed which may be stored indefinitely in this protected state.

[0900] When needed, the acetyl group on the protected sulfhydryl is removed to reveal the sulfhydryl for conjugation to another molecule. A heterobifunctional agent such as SMCC or N-Succinimidyl 3-(2-pyridylthio)propionate (SPDP) may be directly added to the amidated oligonucleotide phosphate group to produce a free sulfhydryl unit for reactivity with the protein or peptide.

[0901] Chemical Conjugation of Polypeptides/Proteins to SAg DNA via Carbodiimide Reaction with the 5′-Phosphates (Phosphoramidate Formation)

[0902] The water-soluble carbodiimide EDC, rapidly reacts with a carboxylate or phosphate to form an active complex able to couple with a primary amine-containing compound. The carbodiimide activates an alkyl phosphate group to a highly reactive phosphodiester intermediate. Diamine spacer molecules or amine-containing peptides then may react with this active species to form a stable phosphoramidate bond. Alternatively, bis-hydrazide compounds may be coupled to DNA using this protocol to yield a terminal hydrazide functional group able to react with aldehyde-containing molecules (Ghosh et. al., 1989). These methods permit specific labeling of SAg DNA only at the 5′ end. The following protocol describes the modification of SAg DNA or RNA oligonucleotides at their 5′-phosphate ends with a bis-hydrazide compound, such as adipic acid dihydrazide or carbohydrazide. A similar procedure for coupling the diamine compound cystamine is described below.

[0903] Protocol

[0904] 1. Weigh out 1.25 mg of the carbodiimide 1-ethyl-3-(3-dimethylamino-propyl)carbodiimide hydrochloride (EDC) into a microfuge tube.

[0905] 2. Add 7.5 ml of SAg RNA or DNA that has 5′ phosphate groups. The concentration of the oligonucleotide should be 7.5-15 nmol or a total of about 57-115.5 mg. Also immediately add 5 ml of 0.25 M bis-hydrazide compound dissolved in 0.1 M imidazole, pH 6.

[0906] 3. Mix (e.g., by vortexing) and centrifuge in a microfuge for 5 min at maximal rpm.

[0907] 4. Add an additional 20 ml of 0.1 M imidazole, pH 6. Mix and allow to react for 30 mm at room temperature.

[0908] 5. Purify the hydrazide-labeled oligonucleotide by gel filtration on Sephadex G-25 using 10 mM sodium phosphate, 0.15 M NaCl, 10 mM EDTA, pH 7.2. The oligonucleotide now may be conjugated with an aldehyde-containing molecule.

[0909] Sulfhydryl Modification of SAg DNA

[0910] Creating a sulfhydryl group on SAg DNA allows conjugation reactions to be done with sulfhydryl-reactive heterobifunctional cross-linkers providing increased control over the derivatization process. Proteins are activated with a cross-linking agent containing an amine-reactive and a sulfhydryl-reactive end, such as SPDP, leaving the sulfhydryl-reactive portion free to couple with the modified DNA molecule. Having a sulfhydryl group on the SAg DNA directs the coupling reaction to discrete sites on the nucleotide strand, thus better preserving hybridization ability in the final conjugate. In addition, heterobifunctional cross-linkers of this type allow two- or three-step conjugation procedures which result in better yield of the desired conjugate than do homobifunctional reagents.

[0911] Cystamine Modification of 5′ Phosphate Groups on Superantigen Nucleotides Using EDC

[0912] SAg DNA or RNA is modified with cystamine at the 5′ phosphate groups using the carbodimide reaction described above. In some procedures, the reaction is carried out in a two-step process by first forming a reactive phosphorylimidazolide by EDC conjugation in an imidazole buffer. Next, cystamine is reacted with the activated oligonucleotide, causing the imidazole to be replaced by the amine and creating a phosphoramidate linkage. Reduction of the cystamine-labeled oligonucleotide using a disulfide reducing agent releases 2-mercaptoethylamine and creates a thiol group.

[0913] Protocol

[0914] 1. Weigh out 1.25 mg of the carbodiimide 1-ethyl-3-(3-dimethylamino-propyl)carbodiimide hydrochloride (EDC) into a microfuge tube.

[0915] 2. Add 7.5 ml of SAg RNA or DNA that has 5′ phosphate groups. The concentration of the oligonucleotide should be 7.5-15 nmol or a total of about 57-115.5 mg. Also immediately add 5 ml of 0.25 M cystamine in 0.1 M imidazole, pH 6.

[0916] 3. Mix (e.g., by vortexing) and centrifuge in a microfuge for 5 min at maximal rpm.

[0917] 4. Add an additional 20 ml of 0.1 M imidazole, pH 6. Mix and allow to react for 30 mm at room temperature.

[0918] 5. For reduction of the cystamine disulfides, add 20 ml of 1 M DTT and incubate at room temperature for 15 mm. This will release 2-mercaptoethylamine from the cystamine modification site and create the free sulfhydryl on the 5′ terminus of the oligonucleotide.

[0919] 6. Purify the SH-labeled oligo by gel filtration on Sephadex G-25 using 10 mM sodium phosphate, 0.15 M NaCl, 10 mM EDTA, pH 7.2. The oligonucleotide now may be used to conjugate with an activated protein containing a sulfhydryl-reactive group.

[0920] SPDP Modification of Amines on Superantigen Nucleotides

[0921] SAg DNA that has been modified with an amine-terminal spacer arm may be thiolated to contain a sulfhydryl residue. Theoretically, any amine-reactive thiolation reagent may be used to convert an amino group on a SAg DNA molecule into a thiol. A preferred reagent both for cross-linking and for thiolation reactions is the heterobifunctional reagent SPDP. The NHS ester end of SPDP reacts with primary amine groups to produce stable amide bonds. The other end of the cross-linker contains a thiol-reactive pyridyldisulfide group that also can be reduced with DTT to create a free sulfhydryl. The reaction of a 5′-diamine-modified SAg DNA oligonucleotide with SPDP proceeds under mildly alkaline conditions (optimal pH 7-9) yields the pyridyldisulfide-activated intermediate. This derivative can be used to couple directly with sulfhydryl-containing compounds, or it may be converted into a free sulfhydryl for coupling to thiol-reactive compounds. In an alternative approach, 2,2′-dipyridyldisulfide is used to create reactive pyridyldisulfide groups on a reduced 5′-cystamine-labeled SAg oligonucleotide. This derivative then can be used to couple with sulffiydryl-containing molecules, forming a disulfide bond.

[0922] Reduction of the pyridyldisulfide end after SPDP modification releases the pyridine-2-thione leaving group and generates a terminal-SH group.

[0923] Protocol

[0924] 1. Dissolve the amine-modified SAg oligonucleotide to be thiolated in 250 ml of 50 mM sodium phosphate, pH 7.5.

[0925] 2. Dissolve SPDP at a concentration of 6.2 mg/ml in DMSO to make a 20 mM stock solution. Alternatively, LC-SPDP may be used and dissolved at a concentration of 8.5 mg/ml in DMSO (also makes a 20 mM solution). If the water-soluble Sulfo-LC-SPDP is used, a stock solution in water may be prepared just prior to addition of an aliquot to the thiolation reaction. In this case, prepare a 10 mM solution of Sulfo-LC-SPDP by dissolving 5.2 mg/ml in water. Since an aqueous solution of the cross-linker will degrade by hydrolysis of the sulfo-NHS ester, it should be used quickly.

[0926] 3. Add 50 ml of the SPDP (or LC-SPDP) solution to the SAg oligonucleotide solution. Add 100 ml of the Sulfo-LC-SPDP solution, if the water-soluble cross-linker is used. Mix.

[0927] 4. Allow to react for 1 h at room temperature.

[0928] 5. Remove excess reagents from the modified SAg oligonucleotide by gel filtration. The modified oligonucleotide now may be used to conjugate with a sulfhydryl-containing molecule, or it may be reduced to create a thiol for conjugation with sulfhydryl-reactive molecules.

[0929] 6. To release the pyridine-2-thione leaving group and form the free sulfhydryl, add 20 ml of 1M DTT and incubate at room temperature for 15 mm. If present in sufficient quantity, the release of pyridine-2-thione is followed by its characteristic absorbance at 343 nm (e=8.08×10³ M⁻¹ cm⁻¹). For many oligonucleotide modification applications, however, the leaving group will be present in too low a concentration to be detectable.

[0930] 7. Purify the thiolated oligonucleotide from excess DTT by dialysis or gel filtration using 50 mM sodium phosphate, 1 mM EDTA, pH 7.2. The modified oligonucleotide should be used immediately in a conjugation reaction to prevent sulfhydryl oxidation and formation of disulfide cross-links.

[0931] N-succinimidyl S-actylthioacetate (SATA) Modification of Amines on Superantigen DNA Nucleotides

[0932] SAg oligonucleotides containing amine groups introduced by enzymatic or chemical means may be modified with SATA to produce protected sulfhydryl derivatives. The NHS (N-hydroxylsuccinimide) ester end of SATA reacts with a primary amine to form a stable amide bond. After modification, the acetyl protecting group can be removed as needed by treatment with hydroxylamine under mildly alkaline conditions. The result is terminal sulfhydryl groups that can be used for subsequent labeling with thiol-reactive probes or activated-protein derivatives.

[0933] Protocol

[0934] 1. Dissolve the amine-modified SAg oligonucleotide to be thiolated in 250 ml of 50 mM sodium phosphate, pH 8.

[0935] 2. Dissolve SATA in DMF at a concentration of 8 mg/ml.

[0936] 3. Add 250 ml of the SATA solution to the oligo solution. Mix.

[0937] 4. React for 3 h at 37° C.

[0938] 5. Remove excess reagents by gel filtration.

[0939] 6. To deprotect the thioacetyl group, add 100 ml of 50 mM hydroxylamine hydrochloride, 2.5 mM EDTA, pH 7.5, and react for 2 h.

[0940] 7. The sulfhydryl-containing oligonucleotide may be used immediately to conjugate with a sulfhydryl-reactive label, or it can be purified from excess hydroxylamine by gel filtration.

[0941] Conjugation of a Polypeptide to SAg DNA

[0942] As indicated, the DNA molecule must be modified to contain one or more suitable reactive groups, such as nucleophiles like amines or sulfiydryls. The modifications that employ enzymatic or chemical methods can result in random incorporation of modification sites or can be directed exclusively to one end of the DNA molecule, e.g., 5′ phosphate coupling. Some of the more common procedures for preparing DNA-polypeptide conjugates are given below.

[0943] Polypeptide (e.g., VT) Conjugation to Cystamine-Modified SAg DNA Using Amine- and Sulfhydryl-Reactive Heterobifunctional Cross-linkers

[0944] Cystamine groups are added to the 5′ phosphate of SAg DNA as described above. Once a sulfhydryl-modified DNA has been prepared, the following protocol may be used. The protein is activated with SPDP. Reacting the SAgic DNA probe in excess allows easy separation of uncoupled SAg oligonucleotide from conjugated molecules.

[0945] Protocol

[0946] 1. Dissolve a 5′-sulfhydryl-modified SAg oligonucleotide in water or 10 mM EDTA at a concentration of 0.05-25 mg/ml. Calculate the total nanomoles of oligonucleotide present based on its molecular weight.

[0947] 2. Add 0.15M NaCl, 10 mM EDTA, pH 7.2. Add the oligonucleotide solution to the activated protein in a 10-fold molar excess.

[0948] 3. React at room temperature for 30 mm with gentle mixing.

[0949] 4. The protein-DNA conjugate is purified away from excess SAg oligonucleotide by dialysis or gel filtration, or through the use of centrifugal concentrators. Centricon-30 concentrators (Amicon) that have a molecular weight cutoff of 30,000 are also used to remove unreacted oligonucleotides. Since the polypeptide molecular weight is approximately 140,000 and the conjugate is even higher, a relatively small DNA oligomer will pass through the membranes of these units while the conjugate will not. To purify the prepared conjugate using Centricon-30s, add 2 ml of the phosphate buffer from step 2 to one concentrator unit, then add the reaction mixture to the buffer and mix. Centrifuge at 1000 g for 15 mm or until the retentate volume is about 50 ml. Add another 2 ml of buffer and centrifuge again until the retentate is 50 ml. Invert the Centricon-30 unit and centrifuge to collect the retentate in the collection tube provided by the manufacturer.

[0950] Administration of Peptide-DNA (pDNA), Naked DNA, or Protein or Peptide Conjugates

[0951] Naked DNA, pDNA, nucleic acid-peptide or -polypeptide conjugates or genetic fusion products are administered parenterally (for example, iv, ip, im, subcutaneously, intrathecally, intratumoral, rectally, transcutaneously) or orally. Administration may also be by a gene gun using a 1 ml syringe and a 28 gauge needle. The nucleic acid is administered intradermally or intramuscularly in a total volume of 100 ml. A Tyne applicator is used to deliver doses of 1-1000 mg of DNA at 3× weekly intervals. SAg-encoding nucleic acid is injected directly into the tumor. The nucleic acid either contains or does not contain immunostimulatory sequences that induce activation of T cells and skew the response toward production of TH1 cytokines. For example, if nucleic acids encoding a tumor associated antigen are used then the nucleic acids are engineered to incorporate ISS sequences in order to fully activate a TH1 response. Likewise, if nucleic acid encoding a tumor associated antigen is cotransfected with nucleic acid encoding a SAg, then one of the nucleic acid constructs is engineered to contain an ISS.

[0952] Viral DNA, nucleic acid expression cassettes or plasmids or bacteriophages encoding the constructs given in Table II may be used for in vivo immunization in place of naked DNA. Viruses may also acquire the aGal epitope after transfection into tumor cells which contain the a-galactosyltransferase enzyme either naturally or via transfection. The virus must possess the intact N-acetyllactosamine substrate for the galactosyl-transferase in order to express the aGal. The viruses shedding from these cells will express the aGal epitope. The virus also contains peptide sequences for SAg and tumor associated antigen acquired from the tumor cells which were previously transfected with nucleic acids encoding SAg and tumor antigen. The shed virus may also express staphylococcal or streptococcal hyaluronidase and capsular polysaccharide sequences obtained from host tumor cell or accessory cells previously transfected with nucleic acids encoding these genes. The shed virus expressing Gal, SAg, hyaluronidase and capsular polysaccharide is capable of initiating a potent tumoricidal response when administered to hosts with established tumors or when used as a tumor vaccine against potential tumors.

[0953] These constructs are also used as vaccines. Further, the nucleic acid construct is pre-processed ex vivo in muscle cells before selective delivery into host tumor tissue. Cationic liposomes or other liposomes or drug carriers well known in the art are used as vehicles to deliver the nucleic acids in vivo. The transfection process is also carried out ex vivo. Nucleic acids encoding SAgs together with the nucleic acid constructs given in Table II are transfected into tumor cells of all types and antigen presenting cells such as MHC class I and class II as well as APCs expressing CD1 and mannose receptors. These include but are not limited to DCs, immunocytes, monocytes, macrophages, and fibroblasts. SAg is transfected alone or together with one or more of the above constructs given in Table II. The transfected cell expresses/secretes preferentially a SAg plus an immunogenic oncogene product, anti-angiogenesis factor, glycosylceramide, LPS or Gal. The transfectants present their gene products on cell surface receptors such as conventional MHC molecules for SAgs or in the case of the glycosylceramides or LPS on a CD-1 or mannose receptor. (APC). Glycosylated SAgs show preference for presentation on mannose receptors.

### EXAMPLE 4

[0954] SAgs, Tumor Antigens Glycosylceramides LPS's, Binary and Ternary Complexes Applied to MHC Class I, Class II CD1 or Mannose Receptors

[0955] The above molecules and all of the conjugates given in section 55 are applied to antigen presenting receptors as given below. CD1 represents a family of non-polymorphic antigen presenting molecules unlinked to the MHC molecules expressed by most professional APCs. The NKT cells that recognize CD1 presented antigens express NKR-P1, Ly49 receptors, an invariant chain and a V8.2 variable region. With respect to these receptors, they share identity and their natural ligands with NK cells. Specifically, CD1 binds peptides with extended NH2 and COOH termini flanking the core binding motif Long peptides (greater than 8 to 10 amino acids) with amino acid residues at their hydrophobic binding sites and greatly restricted anchors are preferred. This recognition of CD1-presented antigens depends on the type and distribution of sugar residues. Mycobacterial cell wall antigens namely mycolic acids and lipoarabinomannan also bind to CD1. Recently several glycosylceramides, in particular, monogalactosyl ceramides GalCer) were shown to bind to CD1 and to activate NKT cells Specifically, CD1 molecules are capable of presenting mannosides with 1,2 linkages and a phosphatidylinositol unit. CD1 bound antigens are recognized by NKT cells (/TCR positive; CD4 and CD8 negative). For instance, NKT cells are activated by a lipoarabimannan (LAM) presented on CD1 receptors and become cytolytic while producing abundant INF.

[0956] In the present invention, a SAg bound to a monogalactosylceramide such as GalCer is loaded onto CD1 or MHC class I or II receptors expressed by APCs. The CD1 or MHC receptors are in soluble or immobilized form produced by methods well described in the art. According to this invention, CD1 receptors present SAg polypeptides complexed with GalCer lipids or oligosaccharides to T cell and/or NKT cell population which recognize the conjugates and commence differentiation to tumor specific effector cells. These ligands are be loaded on the CD1 receptor sequentially, simultaneously or as a preformed conjugates. Alternatively, they are positioned on the CD1 receptor after internal processing of their nucleic acid counterparts in the antigen presenting cells. These cells are then harvested and used for adoptive immunotherapy (Examples 7, 15, 16, 18-23).

[0957] These complexes are also useful in vivo as a preventative or therapeutic antitumor vaccine (Example 14, 15, 16, 18-23).

[0958] SAgs and tumor associated antigen (TAA) are loaded sequentially on to class II receptors of antigen presenting cells. Alternatively, preformed complexes of tumor associated antigen and SAg are loaded onto MHC class II receptors. The SAg may be in the native or glycosylated form. The tumor associated antigen is also fused genetically to the b chain of the MHC class II receptor. A SAg is added once the TAA is expressed bound to the MHC class II. The sequence may also be reversed so that a SAg is genetically processed and bound to the b chain after which the TAA is added. Consensus or repeating nucleic acid sequences shared by a tumor associated antigen and a SAg are cloned into a single sequence and transfected into APCs which display the consensus peptide in the context of the class II receptor. Methodology for production of the fusion genes is well described in the art. (See Ausubel, F M et al., supra; Sambrook, J et al., supra) T cells or NKT cells are activated after exposure to SAg and TAA producing an expanded tumor specific T cell effector population which is useful in adoptive immunotherapy of cancer (Examples 7, 15, 16, 18-23).

[0959] Antigen presenting cells in this system are chosen from a group consisting of DCs, fibroblasts, macrophages, and lymphocytes, but other professional APCs or any other cell transfectants, phage displays or liposomes expressing the class I or class II receptors are also used. Alternatively, a tumor associated antigen is bound to an APC that is pharmacologically or genetically inhibited from antigen processing. SAg is added and the complex of SAg and protein bound to class II is then presented to a T cell population to produce a tumor specific effector cell population for use in adoptive immunotherapy of cancer as in Example 15, 16, 18-23). These complexes are also useful in vivo as a preventative or therapeutic antitumor vaccine (Example 14, 15, 16, 18-23).

[0960] Soluble SAg MHC class II proteins with covalently bound single peptides are produced using a baculovirus system to express in insect cells two murine class II molecules with peptides attached by a linker to the N terminus of their b-chains (Kozono H. et al., Nature 369: 151-154 (1994)). The resulting peptide is engaged by the peptide binding groove of the secreted MHC molecule and this complex is recognized by T cells bearing receptors specific for the combination. In this method, the approximately 100 bp fragment encoding the SAg and a flexible linker with an embedded thrombin cleavage site is introduced in frame by the PCR just after the third codon of the b1 domain. This assures a recognizable leader peptide cleavage site and flexible link between the C-terminus of the foreign peptide bound in the cleft of the MHC molecule and the N terminus of the b1 domain of SAg amino acids. Soluble complexes consisting of receptors and various SAg are prepared in this way and are used to activate T cells for use in adoptive immunotherapy. Similarly, preparations consisting of MHC class I receptors, CD1 or mannose receptors complexed with SAgs, glycosylceramides or LPS's are produced which are useful in activating T cells or NKT cells for adoptive immunotherapy of cancer in protocols given in Examples 7, 15, 16, 18-23). These complexes are also useful in vivo as a preventative or therapeutic antitumor vaccine (Example 14, 15, 16, 18-23).

[0961] To produce complexes composed of SAgs with class I or II MHC or soluble DR a or b (lacking the transmembrane domain) and TCR heterodimer, a soluble human TCR heterodimer which has specificity for various tumor associated antigens bound to the human class I or II MHC molecules or human soluble CD1 molecules is used. A typical system for preparing ternary SAg-tumor peptide-MHC or ternary CD1-glycosylceramide (preferably GalCer)-SAg complexes capable of triggering T cells or NKT cells is as follows. CD1, DR-1 or HLA-A2 restricted tumor antigen specific T cell or NKT cell clones are used although primary unsensitized T or NKT cells may be used as well. The DR-1 and HLA-A2 homozygous Epstein-Barr virus-transformed B cell line LG-2 or DCs expressing CD1 receptors are used as APCs either live or fixed in 0.5% paraformaldehyde for 20 minutes. LG-2 and DCs (2.67×10⁵ per ml) in RPMI 1640 with 1% fetal bovine serum are pulsed with tumor antigen and glycosylceramide respectively for 2 hours at 37° C. and then washed in RPMI 1640/1% fetal bovine serum to remove unbound antigen. SAg is added for 2 hours at 37° C. Pulsed APCs (4×10⁴ per well) are co cultured with resting T cells or NKT cells (2×10⁴ per well) in round-bottom microtiter plates in RPMI 1640/5% human serum. Twenty four hours later, the cells are harvested. The APCs are separated and the T cells or NKT cells may be optionally expanded further with IL.-2 Optionally, complexes comprising soluble recombinant DRa or b chain with bound superantigen are presented to the T cell or NKT cells which are then expanded with IL-2. These cells are then harvested and used for adoptive immunotherapy (Examples 7, 15, 16, 18-23). The APC containing the complexes are also useful in vivo as a preventative or therapeutic antitumor vaccine (Example 14, 15, 16, 18-23).

[0962] Also useful for tumor therapy are the complexes LIP⁺ GPI-SAg (from Section 38), either free or in the form of vesicles or exosomes comprising SAg-GalCer complexes or SAg-tumor peptide (including but not limited to normal mutated structures). The ternary complexes of SAg-GalCer-heat shock protein and tumor peptide-heat shock protein are also useful, These complexes may be in or soluble or immobilized form, attached to a CD1 or MHC or as part of a vesicle or exosome, the complexes are also useful in vivo as a preventative or therapeutic antitumor vaccine (Example 14, 15, 16, 18-23).

[0963] The tumor associated antigen or SAg-tumor associated antigen complex is conjugated to oxidized mannan (polymannose) by methods described by Apostolopoulos, V et al., Proc. Natl. Acad. Sci. USA 92: 10128-10132 (1995) which is then loaded onto mannose receptors of antigen presenting cells for stimulation of a T cell anti-tumor response. Alternatively, the SAg (optionally conjugated to tumor peptides)-mannan conjugate is administered to tumor bearing hosts by methods in Example 15, 16, 18-23).

[0964] The SAg alone or conjugated to a tumor associated antigen is recognized by the mannose receptor on macrophages. This requires a glycosylated SAg which is recognized by the mannose receptor on macrophages. A native or glycosylated tumor associated antigen-SAg conjugate or a consensus peptide of both polypeptides is presented to mannose receptors expressed on antigen presenting cells which are exposed to a T cell or NKT cell population to produce a tumor specific effector cells by methods in Example 15, 16, 18-23). These complexes are also useful in vivo as a preventative or therapeutic antitumor vaccine (Example 14, 15, 16, 18-23). They are also used ex vivo to produce a population of tumor specific effector T or NKT cells for the adoptive immunotherapy cancer by methods and protocols given in Examples 7, 15, 16, 18-23 and 36.

[0965] The mannose receptor delivers the complex to the late endosomal and lysosomal vesicles and the MHC class II loading compartment where the antigen is loaded onto CD1b molecules. The C1b molecule is endocytosed at the plasma membrane in coated pits and vesicle structures, transits to early endosomes and is then delivered to the MHC class II antigen loading compartment. The endosomal localization motif on the tail of the CD1b molecule is essential for antigen trafficking of CD1b through the lysosomal compartment required for loading of antigen into CD1b and its ultimate transport to the membrane. The antigen binding groove of CD1 is deeper and narrower than the MHC class I molecule groove containing a hydrophobic binding site which accommodates the lipid portion of the molecules such as lipoarabinomannan or GalCer and the SAg-LPS constructs given herein. APCs expressing the above constructs are exposed to NKT cell populations which recognize the antigens in the context of the CD1 receptor. If carried out ex vivo this results in the formation of tumor specific effector NKT cells which are used for adoptive immunotherapy by protocols given in Examples 7, 15, 16, 18-23).

### EXAMPLE 5

[0966] SAg Conjugation to Glycosylceramides, Gangliosides LPS's, Glycans, Peptidoglycans Phytosphingolipids, Lipoproteins oxyLDL and Lipoarabinomannans

[0967] All of the SAg-lipid conjugates given above and in section 55 are prepared as follows. Selection of the SAg peptide to be used for coupling is governed by several criteria. In practice, a 10-15 residue peptide is selected. For SAgs, the sites chosen for coupling are those presumed not to be vitally involved in T cell binding and activation. In most SAgs, these sites are broadly distributed throughout the molecule. They are available at flexible regions of the protein and on reverse turns or loop structures. C termini are more mobile than the rest of the molecule and frequently exposed on the protein surface. This region is accessible to be coupled to another ligand especially using m-maleimidobenzoyl-N-hydroxysuccinimide ester (MBS) via a Cys residue that has been added to the N terminus of the peptide. By coupling the peptide via its N-terminal end, the peptide is exposed in a fashion similar to that found in the native antigen.

[0968] Additional criteria for selection of the coupling site such as exposed hydrophilic regions, secondary structure, hydropathicity profiles, and probability of helix formation may not be useful. However, care is take not to disrupt predicted polysaccharide attachment sites, most notably the sequence Asn-X-Ser or Asn-X-Thr, which predicts the presence of Asn-linked polysaccharide moieties. In addition to location of transmembrane regions, Asn-linked glycosylation sites and sites of signal sequence cleavage are all important. After due consideration, the C using 7-15 residues terminus is preferred and is modified to accommodate MBS. This procedure requires a free sulfhydryl group on the synthetic peptide and free amino groups on the ligand. Therefore, to use this method, it is necessary to add a Cys residue to the C or N terminus of the peptide.

[0969] Biochemical Conjugation Methods

[0970] SAgs are conjugated to polysaccharide containing structures using several methods well described in the art (Hermanson, GT Bioconjugate Techniques Academic Press, San Diego, Calif. 1996). Two methods are given here one utilizing the isolated complex carbohydrate obtained from the purified ganglioside which is then chemically conjugated to SAg and in another method wherein the ganglioside and SAg are both incorporated into a liposomal membrane. Either method is used to produce complexes which are included within the scope of this invention. However they are by no means exhaustive of all the techniques which could be employed to conjugate human tumor antigens to SAg molecules. Other conjugation strategies may be utilized to produce an immunologically active complex as described by this invention. (See Offord, R E, in Protein Engineering ed. A R Rees, Oxford, 1992)

[0971] Direct Conjugation of Ganglioside, LPS or Peptidoglycan to SAg Molecules

[0972] 1. Ganglioside or LPS antigens are purified and are then dissolved in aqueous solution at pH 6.0 at a concentration of 1.0 mM/ml

[0973] 2. Endoglycoceramidase from Rhodococcus (Genzyme) is added to the ganglioside solution to a level of 5 milliunits. The solution is incubated overnight at 37° C. with gentle agitation. The endoglycoceramidase specifically cleaves at the ceramide-polysaccharide bond liberating ceramide and clipping off the complex carbohydrate making up the ganglioside

[0974] 3. The polysaccharide is isolated by HPLC size exclusion chromatography or by ultrafiltration

[0975] 4. SAg is dissolved in 1M sodium phosphate, 0.15 M NaCl, pH 7.5, at a concentration of 1 mg/ml. The purified polysaccharide antigen is added to this solution to a concentration of at least 1 mM/ml.

[0976] 5. In a fume hood, 20 microliters of 5 M sodium cyanoborohydride solution in 1 M NaOH (Aldrich) is added to each ml of the SAg solution.

[0977] 6. The reaction is mixed gently and incubated at room temperature for 72 hours or 4° C. for 1 week. This reaction reductively aminates the reducing end of the polysaccharide (at the point it was cleaved by the endoglycoceramidase) to the amine groups on the SAg protein creating stable conjugate coupled through a secondary amine linkage. The degree of polysaccharide coupling can be controlled by limiting the time of reaction.

[0978] 7. Remove unreacted carbohydrate and cyanoborohydride by gel filtration on Sephadex G-25 or by dialysis.

[0979] In a second method, SAg-GalCer, SAg-GalCer-CD1, SAg-glycosphingolipid, or SAg-glycosphingolipid-CD1 complexes or SAg conjugates given in secton 55 are produced which have the added benefit of presenting the glycosylceramide in a polyvalent array which is important for high affinity binding to complementary receptors. They retain nearly all of their original structure including most of the ceramide moiety and the entire oligosaccharide chain. The principle of preparation derived from Mahoney, J A et al., Meth. Enzymol 242: 17-27 (1994) is as follows. The fatty acid amide is hydrolyzed from the intact ganglioside converting it to its lyso form which has a unique primary amine at the 2-position of sphingosine. The lysoganglioside is treated with a bifunctional cross-linking reagent, succinimidyl 4(N-maleimidomethyl)cyclohexane-1-carboxylate (SMCC), which forms an amide bond to the 2-position of sphingosine and results in a sulfhydryl-reactive maleimidyl moiety attached through a linker arm, to the original position of the fatty acid amide on the ceramide portion of the ganglioside. The SAg protein is treated with a reagent, N-succinimidyl S-acetylthioacetate (SATA), which converts the lysine e-amino groups to acetylated sulfhydryls. Subsequent treatment with hydroxylamine reveals the desired free sulfhydryls. Treatment of sulfhydryl-derivatized SAg with maleimidyl derivatized ganglioside results in a stable thioester linkage between the ganglioside and the protein. The final product is chromatographically purified and characterized by protein and carbohydrate analysis. The SAg-GalCer or SAg-glycosphingolipid complex is then loaded onto a soluble CD1 receptor.

[0980] LPS's and peptidoglycans are conjugated to SAg by methods well described in the art. The most convenient and preferred method to target specifically the polysaccharides on the protein is through mild sodium periodate oxidation. Periodate cleaves adjacent hydroxyl groups in sugar residues to create highly reactive aldehyde functional groups. The generated aldehydes are used to in coupling reactions with amine or hydrazide containing molecules to form covalent linkages. Amines react with formyl groups under reductive amination conditions using a suitable reducing agent such as sodium cyanoborohydride. The result of the reaction is a stable secondary amine linkage. Hydrazides spontaneously react with aldehydes to form hydrazone linkages, although the addition of a reducing agent greatly increases the efficiency of the reaction and the stability of the bond. (See Hermanson, G T, Bioconjugate Techniques, Academic Press, San Diego Calif. 1996).

[0981] Production of Liposomes Displaying Glycolipid or Apolipoprotein or oxyLDL-SAg Complexes

[0982] Liposomes composed of the highly immunogenic constructs described herein are prepared. They may include lipoproteins such as SAgs coupled to Gal, GalCer, SAg-glycosphingolipid, SAg-glycosylceramides, SAg-phytosphingolipids, SAg-mycosphingolipid and SAg-lipid conjugates given in section 55. Liposomes comprising SAgs conjugated to apolipoproteins or oxyLDL receptors are useful for targeting endothelial or macrophage oxyLDL receptors in tumor microvasculature. Other SAg conjugates e.g., SAg-glycosphingolipid, SAg-glycosylceramides, SAg-phytosphingolipids, SAg-mycosphingolipid are useful in immunizing T cells, NK cells and NKT cells. Cationic liposomes are also useful as a means of transferring the nucleic acid constructs of this invention to tumor tissue. GalCer (a monogalactosylceramide) comprises the major portion of the liposome. The most effective lengths of fatty acyl chain and sphingosine (or ceramide) base are C26 and C18 respectively and a phytosphingosine backbone. Sphingolipids lend structural advantages to the integrity of liposomal membranes and have prolonged duration in vivo. The Gal carbohydrate epitope is linked to liposomes via the amphipathic properties of the surface sphingolipids. The Gal is converted to a glycolipid with a sphingosine backbone possessing a hydrophobic fatty acid tail that embeds them into membrane bilayers. The hydrophilic carbohydrate ends of these amphipathic molecules can interact with molecules dissolved in the surrounding environment. Sphingosine glycolipids consisting of lactosylceramide, GalGal(1-3)Gal(1-4)GlcNAc-R) or glycosphingolipids with terminal Gal(a1-4)Gal are prepared in a manner similar to that of sphingolipids.

[0983] All methods of preparation of liposomes have several steps in common: (1) dissolution of the lipid mixture in an organic solvent, (2) dispersion in an aqueous phase, and (3) fractionation to isolate the correct liposomal population. In the first stage, the desired mix of lipid components is dissolved in organic solvent (usually chloroform:methanol (2:1 by volume) to create a homogenous mixture. This mixture includes any phospholipid derivatized to contain reactive groups as well as other lipids used to form and stabilize the bulk of the liposomal structure. The correct ratio of lipid constituents to form stable liposomes is important A reliable liposomal composition for encapsulating aqueous substances contains molar ratios of lecithin:cholesterol:negatively charged phospholipid (e.g., phosphatidyl glycerol) of 0.9:1:0.1. Apolipoproteins (e.g., LP(a)) or oxyLDL (e.g., 7b-hydroperoxycholesterol or 7b-hydroperoxy-choles-5-en-3B-ol) can substitute for cholesterol in the preparation of the liposomes. In general, to maintain membrane stability, the PE derivative should not exceed a concentration ratio of about 1-10 mol PE per 100 mol of total lipid. Once the desired mixture of lipid components is dissolved and homogenized in organic solvent, several techniques are used to disperse the liposomes in aqueous solution. These methods are broadly classified as (1) mechanical dispersion, (2) detergent-assisted solubilization, and (3) solvent-mediated dispersion. With mechanical dispersion to form vesicles, the lipid solution is dried to remove all traces of organic solvent prior to dispersion in aqueous media. The dispersion process is key to producing liposomal membranes of the correct morphology. Methods utilized include simple shaking, high pressure emulsification, sonication, extrusion through small-pores membranes and various freeze-thaw techniques. Detergent-assisted solubilization is also used to bring the lipid more effectively into the aqueous phase for dispersion. Triton X, alkyl glycosides or bile salts such as sodium deoxycholate are employed. Other modalities or dispersion include the steps of dissolving phospholipids and other lipid to be part of the liposomal membrane in ethanol. This ethanolic solution is then rapidly injected into an aqueous solution of 0.16 M KCl using a Hamilton syringe resulting in a maximum concentration of no more than 7.5% ethanol. Using this method, single bilayer liposomes of about 25-nm diameter are produced. To remove the excess aqueous components that are not encapsulated during the vesicle formation, gel filtration using Sephadex G-50 or dialysis is employed. To fractionate the liposome population according to size, gel filtration is carried out using a column of Sepharose 2B or 4B.

[0984] SAgs are conjugated to the GalCer or glycosphingolipids with terminal Gal(α1-4)Gal, apolipoproteins, LDL or oxyLDL or LDL receptors before incorporation into the liposomal membrane or they may be incorporated into the membrane during the preparation of the liposomal membrane. Likewise, the SAg is conjugated to GalCer or glycosphingolipids with terminal Gal(α1-4)Gal at the glycolipid's polar head region by methods well known in the art including using heterobifunctional crosslinkers or periodate oxidation techniques. Alternatively, after the GalCer or glycosphingolipids with terminal Gal(a1-4)Gal is incorporated into the membrane, the liposomes are derivatized for further binding to the SAg proteins using the sodium periodate which oxidizes the ceramide's free hydroxyl to an aldehyde which is further modified by reductive amination. Using the phosphatidylethanolamine of the lipid in the liposome, SAgs are coupled to the liposome using various bifunctional agents including carbodiimide, glutaraldehyde, dimethyl suberimidate, periodate oxidation followed by reductive amination, N-succinimidyl 3-(2-pyridyldithio)propionate (SPDP), succinnidyl-4-(p-maleimidophenyl)butyrate (SMPB), iodoacetate, succinimidyl-4-(N-maleimidomethyl)cyclohexane-1-carboxylate (SMCC).

[0985] Two general methods are used to prepare immunogenic (i) SAg-GalCer, (ii) GalCerGal, (iii) GalCerGal-SAg and (iv) SAg-glycosphingolipid complexes: The molecules (1) are dissolved in solution and encapsulated within the vesicle construction, or (2) covalently coupled to phospholipid constituents in the lipids using standard cross-linking chemical reactions. Covalent coupling of SAg to liposomes is done through the head groups using various phospholipid derivatives and cross-linking chemical reactions. These are done via the PE molecules. Simple encapsulation is also a viable technique as described in Hermanson (supra).

[0986] A sample method using periodate oxidation and reductive amination is given below.

[0987] 1. A 5 mg/ml liposome suspension is prepared in 20 mM sodium phosphate 0.15 M NaCl, pH 7.4. containing, on a molar ratio basis as mixture of phosphatidyl choline: cholesterol:phosphatidyl glycerol of 8:10:1. Other liposome compositions may be used, for example methods without cholesterol, as long as a periodate-oxidizable component containing vicinal hydroxyls (e.g., phosphatidyl glycerol) is present. Any method of liposome formation may be used that is common to those skilled in the art including mechanical dispersion.

[0988] 2. Sodium periodate is dissolved to a concentration of 0.6 M by adding 128 mg/ml of water. 200 ml of this stock periodate solution is added to each mol of the liposome suspension with stirring.

[0989] 3. React for 30 min. at room temperature in the dark.

[0990] 4. The oxidized liposomes are dialyzed against 20 mM sodium borate, 0.15 M NaCl, pH 8.4, to remove unreacted periodate. This buffer is ideal for the subsequent coupling reaction. Chromatographic purification using a column of Sephadex G50 is also done. The periodate-oxidized liposomes are used immediately to couple with SAg molecules or they may be stored in a lyophilized state in the presence of sorbitol for later use.

[0991] 5. SAg is added to the periodate oxidized liposome solution to obtain a 1 mg/ml concentration.

[0992] 6. In a fume hood, add 20 ml of 5 M sodium cyanoborohydride solution in 1 M NaOH (Aldrich) to each ml of the SAg solution.

[0993] 7. The reaction is mixed gently and incubated at room temperature for 6 hours.

[0994] 8. Excess SAg and cyanoborohydride are removed by size exclusion chromatography on a column of Sephadex G-50 or by dialysis using a membrane with a molecular weight cutoff of 100,000 daltons.

[0995] 9. Ganglioside antigens isolated by the method described previously are incorporated into SAg-containing liposomes by detergent dialysis. An amount of ganglioside is added representing twice the amount of phosphatidyl glycerol (on a molar basis) originally added to form the liposome (prior to periodate oxidation). To this solution, concentrated sodium deoxycholate is added to obtain a final concentration of 0.7% (w/w) and mixed thoroughly using a Vortex mixer. Finally, the liposome suspension is dialyzed against PBS, pH 7.5. A sample of the encapsulation technique is given in Hermanson, supra.

[0996] An additional method for preparation of liposomes containing GalCer or glycosphingolipids with terminal Gal(α1-4)Gal is as follows: The donor liposomes consist of liver phosphatidylcholine, dicetyl phosphate, cholesterol, 3-(Man1-3Man-sn-1,2diacylglycerol) and galactosylceramide. These are mixed in various percentages to permit optimal expression of the galactosylceramide. Constituent lipids in chloroform-methanol are mixed and dried under a stream of nitrogen. Buffer consisting of 0.15M NaCl, 10 MM sodium phosphate, pH 7.4, 1 mM dithiothreitol, 0.02% NaN₃ is added to the dried lipids at a volume of 1 ml per 0.9 mmol of lipid phosphorus in the donor liposomes. After a 30-min incubation at 25° C., the lipids are dispersed into the buffer by sonication with a Bransom sonifier for 30 min under nitrogen at 0° C. The liposome suspension is used the same day after centrifugation at 1500 g for 30 min to remove any undispersed lipid and titanium fragments released from the sonication probe.

[0997] Liposomes used for transfer of nucleic acid constructs given herein have unique structures as described below. A cationic liposome composed of dimyristyloxypropyl-3-dimethyl-hydroxyl ammonium (DMRIE) with DOPE has allowed up to 100 fold higher concentrations of lipid and DNA to be administered in vivo with minimal toxicity. Improved transfection techniques have been observed with the DMRIE/DOPE of two to seven fold. The prototype cationic lipid for gene transfer is DOTMA (N[1-(2,3-dioleyloxy)propyl]-N,N,N-tri-methylammonium chloride) which is mixed with a equimolar amount of DOPE (dioleoyl phosphatidylethanolamine). The lipid DOTMA/DOPE comprise the cationic liposome known a Lipofectin. For human studies, two different cationic liposomes formulations are used. The first includes DC-cholesterol (3β[N-(N′N′-dimethylaminoethane)-carbamoyl]cholesterol) mixed with DOPE. DC-cholesterol/DOPE is low concentrations has proven to reduce toxicity to cells in vitro, is metabolized in vivo, and has provided successful gene transfer into malignant tumors in humans (See Example 17 for use in humans).

[0998] Genetic Fusion of SAgs to LPS's

[0999] N-linked glycosylation occurs exclusively in the ER, where Glc3Man9GlcNAc2 is added to Asn residues present in the sequence Asn X Ser/Thr (X, any residue except Pro). To produce a glycosylation site on a SAg capable of binding a LPS, recombinant vaccinia virus expressing SAg is produced with Gln149 or Asn149 directed to the ER by appendage of NH2-terminal ER insertion, The SAg is directed to the secretory pathway using signal sequence from IFN. Recombinant vaccinia viruses (rVVs) expressing TAP and SAg nucleoprotein are used. The full length SAg gene modified by standard molecular genetic methods to encode glycosylation sites is inserted into the thymidine kinase locus of vaccinia viruses (VVs) by homologous recombination as described using the pSX11 plasmid to express foreign proteins under the control of the VV p7.5 early/late promoter. SAg nucleoprotein is directed to the secretory pathway using the signal sequence from IFNb. The SAg coding sequences of all of the rVVs are verified by sequencing PCR-amplified copies of full-length NP genes isolated from the rVV. The resulting SAg-LPS or SAg-lipoprotein complexes are used to immunize a population of T or NKT effector cells for use in the adoptive immunotherapy of cancer (Examples 2, 5, 7, 15, 16, 18-23). They may be preloaded onto CD1 or MHC Class I or II receptors on APCs as described below in the course of ex vivo immunization. These complexes may also be used in vivo as a preventative or therapeutic antitumor vaccine as in Example 14, 15, 16, 18-23.

[1000] Preparation of Fusion Proteins

[1001] Preferred fusion proteins comprise SAgs linked to other proteins or peptides such as VTs or their A and B subunits, IFNα receptors, CD19 peptides or carbohydrate recognition units which are designed to target the SAg to glycosphingolipid receptors on tumor cells or avb3 ligand Arg-Gly-Asp or aᵥb₅ ligand Asn-Gly-Arg in vivo or in vitro. These fusion proteins induce apoptosis of the tumor cells. The fusion proteins are produced by conventional methods in a variety of cells using a variety of vectors such as phage 1 regulatory sequences. Techniques are well established for producing fusion proteins that include the lacZ protein(b-galactosidase), trpE protein, glutathione-S-transferase, and thioredoxin. Expression in E. coli is most conventional but baculoviral expression systems are also useful. Fusion proteins are produced in bacteria by placing a strong, regulated promoter and an efficient ribosome-binding site upstream of the cloned gene. Exemplified below is a procedure using a representative lacZ vector. However, it should be recognized that other vectors well known in the art would be useful. Plasmids encoding the above proteins are prepared as previously described.

[1002] Construction of Expression Plasmids and Detection of Fusion Proteins

[1003] 1. The appropriate pUR (or pEX or pMR100) vector is ligated in-frame to cDNA fragments to be expressed as fusion partners using the above plasmids to create an in-frame fusion. cDNA encoding the verotoxins may be obtained from Dr. G. Lingwood, University of Toronto; murine p31 Ii are from Dr. R. Germain, National Institutes of Health and J. Miller, University of Chicago.

[1004] 2. Bacteria of the following strains are transformed: E. coli K12 71/18 or JM1O3 with pUR vectors, M5219 with pEX vectors or LG9O for pNR100 vectors. The cells are plated on LB medium containing ampicillin (100 mg/ml) and incubated overnight at 37° C. (or 30° C. in the case of the pEX vector). MacConkey lactose indicator plates should be used for pMR100.

[1005] 3. Individual colonies are tested for the presence of the desired insert by plasmid minipreps.

[1006] If most of the colonies can be assumed to contain a cDNA (because directional cloning or a dephosphorylated vector was used in step 1), they can be screened for protein production in parallel (see step 4b). If not, clones that contain a cDNA, as determined by plasmid minipreps, can be screened for protein expression later. cDNA inserts into a pMR100 plasmid can be detected readily as red colonies on the MacConkey lactose indicator plates.

[1007] 4. Colonies are screened as follows for expression of the fusion protein.

[1008] a. Grow small cultures from 5-10 colonies in LB medium containing ampicillin (100 mg/ml). Incubate overnight at 37° C. (or at 30° C. for pEX).

[1009] b. Inoculate 5 ml of LB medium containing ampicillin (100 mg/ml) with 50 ml of each overnight culture. Incubate for 2 hours at 37° C. (or at 30° C. for pEX) with aeration. Remove 1 ml of uninduced culture, place it in a microfuge tube, and process as described in steps d and e. If screening for protein production is being done in parallel, prepare plasmid minipreps from 1-ml aliquots of the overnight cultures.

[1010] c. Induce each culture as follows: For pUR or pMR100 vectors, add isopropylthio-β-D-galactoside (IPTG) to a final concentration of 1 nM and continue incubation at 37° C. with aeration. For pEX vectors, transfer the culture to 40° C. and continue incubating with aeration.

[1011] d. At various time points during the incubation (i.e., 1, 2, 3, and 4 hours), transfer 1 ml of each culture to a microfuge tube, and centrifuge at 12,000 g for 1 minute at room temperature in a microfuge. Remove the supernatant by aspiration. The kinetics of induction varies with different proteins, so it is necessary to determine the time at which the maximum amount of product is produced.

[1012] e. Resuspend each pellet in 100 ml of 1×SDS gel-loading buffer, heat to 100° C. for 3 minutes, and then centrifuge at 12,000 g for 1 minute at room temperature. Load 15 ml of each suspension on a 6% SDS polyacrylamide gel. Use suspensions of cells containing the vector alone as a control. (For pEX and ORF vectors, also use b-galactosidase as a control.) The fusion protein should appear as a novel band migrating more slowly than the intense b-galactosidase band in the control. It is not uncommon for a protein the size of b-galactosidase to be present along with the fusion protein.

[1013] Composition of 1×SDS gel-loading buffer

[1014] 50 mM Tris Cl (pH 6.8)

[1015] 100 mM dithiothreitol (DTT)

[1016] 2% SDS (electrophoresis grade)

[1017] 0.1% bromophenol blue

[1018] 10% glycerol

[1019] To prepare glycolipid, phytosphingosine, apolipoprotein, oxyLDL or receptor containing liposomes, 400 mg of galabiosylceramide (Gb2) globotriosylceramide (Gb3), globotetraosylceramide (Gb4), galactosylceramide (GalCer), glucosylceramide (GlcCer), phytoshpingosine, oxyLDL or apolipoprotein are dried with 200 mg of phosphatidylethanolamine (PE) and 200 mg of phosphatidylserine (PS) under a stream of nitrogen gas. 400 ml of sterile isotonic PBS, pH 7.4, is added to the lipid, and the mixture is sonicated using a water bath sonicator for 30 minutes. Liposome preparations are used immediately.

[1020] To incorporate exogenous glycolipid into cells, tumor cells in late logarithmic growth phase, sickled erythrocytes or vesicles (1.6×10⁷ cells) are washed twice with PBS to remove serum proteins and then suspended in serum-free RPMI 1640 medium at 4×10⁶ cells/ml. The cells are incubated in the presence of the liposomes (or PBS for controls) prepared as above with rotary shaking (100 rpm) at 37° C. for 1 hr., washed twice (5 min. 800×g) with PBS. and incubated for 18-24 hr at 37° C. in the presence of medium supplemented with 10% fetal calf serum prior to use.

[1021] Membrane & Vesicle Transfers

[1022] Exogenous lipids e.g., galactosylceramides from proximal tubular epithelial cells, MDCK canine renal cells or phytosphinosine from amphibian cells are incorporated into dendritic cells or tumor cells or dendritic cell (accessory cell)/tumor cell fusions as follows:

[1023] Preparation of Plasma Membrane

[1024] Plasma membrane fractions are prepared and analyzed as described (Monneron A et al., J. Cell Biol. 77: 211-231 (1978)). Only the lightest fractions (band 1 at the interface between buffer and 22.5% sucrose and band 2 at the interface between 22.5% and 35% sucrose), containing pure plasma membrane vesicles, are collected and pooled. From 10¹⁰ cells, 0.8-1.0 mg of protein is recovered in the combined fraction. The plasma membrane enzyme markers 5′-nucleotidase (EC 3.1.3.5) and alkaline phosphatase (EC 3.1.3.1) are 1×SDS gel-loading buffer lacking dithiothreitol can be stored at room temperature. Dithiothreitol should then be added, just before the buffer is used, from a 1 M stock.

[1025] Loading of SAg-LPS, SAg-Lipoprotein, SAg-Lipid SAg-Glycolipid or SAg-Phytolipid Conjugates onto CD1 or MHC Receptors

[1026] For loading of SAg LPS or SAg-lipoprotein SAg-lipid, SAg-glycolipid SAg-phytolipid conjugates or SAg-lipid complexes from section 55 onto CD1 receptors, recombinant soluble CD1-2M complexes in Drosophila melanogaster cells are used to screen a random peptide phage display library(RPPDL). The absence of peptide-loading machinery in D. melanogaster cells results in the expression of class 1 molecules that are properly folded and functionally competent but essentially devoid of bound peptide. This approach has been shown to be useful in defining peptide binding motifs for classical and nonclassical MHC Class I and Class II molecules. (Jackson et al., Proc. Natl. Acad. Sci. 89:1217-1224, 1992; Hammer et al., J. Exp. Med 175,1007-1012, 1992; Hammer et al., Cell 74, 197-201, 1993). Each clone of SAg-lipoprotein contains a random 22-amino acid sequence at the mature NH2 terminus of the gene VIII (filamentous coat protein of the M13 bacteriophage). Recombinant soluble mCD1 is engineered with a C-terminal hemagglutinin (HA) tag, an epitope derived from the influenza HA protein. In this way, the mCD1-phage complexes are identified with a HA tag specific antibody. For immunizing usage, isolated receptor or antigen presenting cells of various types which express CD1 or MHC class II molecule pretreated with formaldehyde may be used for loading the SAg-LPS or SAg-lipoprotein complexes. These APCs with bound complexes are then used to immunize T cells or NKT cells for use in adoptive immunotherapy of cancer (Examples 2, 7, 15, 16 18-23).

[1027] Incorporation of Exogenous Lipid e.g. Glycolipid, Phtosphingosine, Apolipoprotein or oxyLDL into Cells by Fusion with Liposomes

[1028] Liposomes enriched 30-fold and 70-fold, respectively, over the homogenate; no activity of the cytoplasmic enzyme lactate dehydrogenase are found. No traces of RNA or DNA contamination are found. The membranes obtained are either immediately frozen in aliquots at −70° C. or used at once.

[1029] Reconstituted Vesicles

[1030] Three types of vesicles are prepared as follows: (i) reconstitution of solubilized Sendai virus envelopes (V vesicles), (ii) reconstitution of solubilized plasma membranes (PM vesicles), and (iii) coreconstitution of solubilized Sendai virus envelope and plasma membranes (VPM vesicles). Sendai virus (20 mg of protein), solubilized in 2 ml of resolution buffer containing 2% Triton X-100 for 1 hr at room temperature, is centrifuged (1 hr. 100,000×g) to yield a clear supernatant (1.5 mg of protein per ml) containing mainly the two envelope glycoproteins, neuraminidase/hemagglutinin glycoprotein (NH) and fusion glycoprotein (F). For preparation of VPM vesicles, freshly solubilized plasma membranes (1 mg of protein per 0.3 ml of resolution buffer containing 1% Triton X-100, 20 min., 4° C.) are mixed with the solubilized viral envelopes (1 mg of protein per 0.7 ml of resolution buffer) and dialyzed in Spectrapor membrane-2 against 1000-fold excess of reconstitution buffer containing 1.5 g of wet Bio-beads SM-2 per liter [for efficient removal of the detergent]. PM and V vesicles are prepared by the same procedure except that one of the components was omitted and replaced by resolution buffer alone. Dialysis is continued for 96 hr at 4° C. until the Triton X-100 concentration dropped below 0.02%. The dialyzed solutions are centrifuged at 100,000×g for 3 hr at 4° C. to obtain reconstituted vesicles. The pellet is suspended in 0.3-0.5 ml of resolution buffer, divided into small aliquots, and frozen at −70° C. Each aliquot is thawed only once for fusion experiments.

[1031] Fusion of Reconstituted Vesicles with Tumor Cells

[1032] Tumor cells (10⁶ cells) are incubated with 5-30 mg of protein of reconstituted vesicles in 1 ml of fusion solution. After 60 mm at 4° C. with occasional shaking, during which the Sendai virus bound to the cells, the cells are collected by centrifugation, resuspended in 1 ml of fusion solution containing 5 mM Ca²+, and incubated at 37° C. for 30 mm for the fusion process. The cells are then washed with phosphate-buffered saline (pH 7.4) and suspended in RPMI-1640 medium containing 5% (vol/vol) heat-inactivated fetal calf serum.

[1033] Assessment of Incorporation

[1034] Tumor cells are analyzed for uptake of the various glycolipids, apolipoproteins, oxyLDL, phytosphingosine, glycosylceramides by use of direct staining with specific antisera, binding by lectin receptors and they are tested in vitro for activation of T cells, NK cells, NKT cells using proliferative assays and induction of cytokines IL-2, IL-4, IL-12 and IFN-g by methods well established in the art.

### EXAMPLE 6

[1035] Targeting SAg Nucleic Acids Phage Display Systems and Polypeptides to Tumor Sites

[1036] Parenterally administered nucleic acid is targeted to a particular cell population as follows. Nucleic acid is attached to a desialylated galactose moiety that targets asialo-orosomucoid receptors in liver cells. Nucleic acid is attached to other ligands such as transferrin and TAP-1 as well as antibodies to surface structures such as the Le^{y} receptor. These ligands and antibodies bind to surface structures and are internalized. Thus, the attached nucleic acid is delivered to a cell of choice.

[1037] Sickled Erythrocytes as Gene Carriers

[1038] Erythrocytes from patients with sickle cell anemia contain a high percentage of SS hemoglobin which under conditions of deoxygenation aggregate followed by the growth and alignment of fibers transforming the cell into a classic sickle shape. Retardation of the transit time of sickled erythrocytes results in vaso-occlusion. SS red blood cells have an adherent surface and attach more readily than normal cells to monolayers of cultured tumor endothelial cells. Reticulocytes from patients with SS disease have on their surface the integrin complex a4b1 which binds to both fibronectin and VCAM-1, a molecule expressed on the surface of tumor endothelial cells particularly after activation by inflammatory cytokines such as TNF, interleukins and lipid-mediated agonists (prostacyclins). Activated tumor endothelial cells are typically procoagulant. Similar molecules are upregulated on the neovasculature of tumors. In addition, upregulation of the adhesive and hemostatic properties of tumor endothelial cells are induced by viruses, such as herpes virus and Sendai virus. Sickled erythrocytes lack structural malleability and aggregate in the small tortuous microvasculature and sinusoids of tumors. In addition, the relative hypoxemia of the interior of tumors induces aggregation of sickled erythrocytes in tumor microvasculature. Hence, sickled erythrocytes with their proclivity to aggregate and bind to the tumor endothelium are ideal carriers of therapeutic genes to tumor cells.

[1039] Red blood cell mediated transfection is used to introduce various nucleic acids into the sickled erythrocytes. The extremely plastic structure of the erythrocyte and the ability to remove its cytoplasmic contents and reseal the plasma membranes enable the entrapment of different macromolecules within the so-called hemoglobin free “ghost.” Combining these ghosts and a fusogen such as polyethylene glycol has permitted the introduction of a variety of macromolecules into mammalian cells (Wiberg, F C et al., Nucleic Acid Res. 11: 7287-7289 (1983); Wiberg, F C et al., Mol. Cell. Biol. 6: 653-658 (1986); Wiberg, F C et al., Exp. Cell. Res. 173: 218-227 (1987). Both transient and stable expression of introduced DNA are achieved by this method. Sickled cells can also be transfected with a nucleic acid of choice e.g., apolipoproteins, RGD in the nucleated prereticulocyte phase (e.g. proerythroblast or normoblast stage) by methods given in Example 1. Sickled erythrocytes transfected with nucleic acids encoding a SAg and/or carbohydrate modifying enzyme to induce expression of the α-Gal epitope, apolipoproteins, RGD and/or any construct described herein. Nucleic acids encoding additional polypeptides alone or together with SAg as described in Tables I and II to including but not limited to angiostatin, apolipoproteins, RGD, streptococcal or staphylococcal hyaluronidase, chemokines, chemoattractants and Staphylococcal protein A are transfected into and expressed by sickled erythrocytes. These sicled cell transfectants are administered parenterally and localize to tumor neovascular endothelial sites where they induce a anti-tumor response. The methods of in vivo transfection of tumor cells are given in the Examples 17. Protocols for use of these transfectants in the induction of anti-tumor immune response are described in Examples 14, 15, 16, 18-23, 31.

[1040] Vesicles from Sickled Erythrocytes

[1041] Vesicles from sickled erythrocytes are shed from the parent cells. The contain membrane phospholipids which are similar to the parent cells but are depleted of spectrin. They also demonstrate that a shortened Russell's viper venom clotting time by 55% to 70% of control values and become more rigid under acid pH conditions. Rigid sickle cell vesicles induce hypercoagulability, are unable to pass through the splenic circulation from which they are rapidly removed. Sickled erythrocytes are transfected in the nucleated prereticulocyte phase with superantigen and apolipoprotein nucleic acids as well as RGD nucleic acids. Nucleic acids encoding additional polypeptides alone or together with SAg as described in Tables I and II are transfected into and expressed by sickled erythrocytes. Any of the the immature or mature sickled erythrocytes and their shed vesicles expressing the molecules given in Tables I and II are capable of localizing to tumor microvascular sites where they bind to apolipoprotein receptors and induce an anti-tumor effect. Because of their adhesive and hypercoagulable properties as well as their rigid structure, these sickled cell vesicles expressing superantigen and apolipoproteins are especially useful for targeting the tumor microvascular endothelium and producing a prothrombotic, inflammatory anti tumor effect. Sicled erythrocytes and their vesicles are capable of acquiring oxyLDL via fusion with oxyLDL containing liposomes as in Example 5. The resulting sickle cell or liposome expresses oxyLDL alone or together with SAg. Binding of oxyLDL to the SREC receptor on tumor microvascular endothelial cells induces apoptosis and simultaneous superantigen deposition produces a potent T cell anti-tumor effect.

[1042] Vesicles are prepared and isolated as follows: Blood is obtained from patients with homozygous sickle cell anaemia. The PCV range is 20-30%, reticulocyte range is 8-27%, fetal hemoglobin range is 25-13% and endogenous level of ISCs is 2-8%. Blood is collected in heparin and the red cells are separated by centrifugation and washed three times with 09% saline. Cells are incubated at 37° C. and 10% PCV in Krebs-Ringer solutions in which the normal bicarbonate buffer is replaced by 20 mM Hepes-NaOH buffer and which contains either 1 mM CaCl2 or 1 mM EGTA. All solutions contain penicillin (200 u/mI) and streptomycin sulphate (100 ug/mI). Control samples of normal erythrocytes are incubated in parallel with the sickle cells. Incubations of 10 ml aliquots are conducted in either 100% N2 or in room air for various periods in a shaking water bath (100 oscillations per mm). N2 overlaying is obtained by allowing specimens to equilibrate for 45 mm in a sealed glove box (Gallenkamp) which was flushed with 100% N2. Residual oxygen tension in the sealed box was less than 1 mmHg. The percentage of irreversibly sickled cells is determined by counting. 1000 cells after oxygenation in room air for 30 mm and fixation in buffered saline (130 mM Cl, 20 mM sodium phosphate, pH 74) containing 2% glutaraldehyde. Cells whose length is greater than twice the width and which possessed one or more pointed extremities under oxygenated conditions are considered to be irreversibly sickled.

[1043] After various periods of incubation, cells are sedimented at 500 g for 5 mm and microvesicles ) are isolated from the supernatant solution by centrifugation at 15,000 g for 15 mm. The microvesicles form a firm bright red pellet sometimes overlain by a pink, flocculent pellet of ghosts (in those cases where lysis was evident) which is removed by aspiration. Quantitation of microvesicles is achieved by resuspension of the red pellet in 1 ml of 05% Triton X100 followed by measurement of the optical density of the clear solution at 550 nm. Optical density measurements at 550 nm give results that are relatively the same as measurements of phospholipid and cholesterol content in the microvesicles. Cell lysis is determined by measurement of the optical density at 550 nm of the clear supernatant solution remaining after sedimentation of the microvesicles. Larger samples of microvesicles for biochemical and morphological analysis are prepared from both sickle and normal cells following incubation of up to 100 ml of cell suspension at 37° C. for 24 h in the absence or presence of Ca²⁺. Ghosts are prepared from sickle cells after various periods of incubation. The cells are lysed and the ghosts washed in 10 mM Tris HCl buffer, pH 73, containing 02 mM EGTA.

[1044] These vesicles are useful as a preventative or therapeutic vaccine as in Examples 15, 16, 18-23, 36.

[1045] Phage Displayed SAgs

[1046] Phages displaying or free tumor homing peptides ligands such as the tripeptides Arg-Gly-Asp and Asn-Gly-Arg which tripeptides bind to the integrins aᵥb₃ and aᵥb₅, respectively, that are located on tumor microvasculature, are conjugated to (1) a SAg peptide, (2) naked DNA encoding a SAg peptide or (3) phage displaying a SAg peptide. These constructs are prepared as in Examples 3 and 5 and are further described in Jackson R H, et al., In: Protein Engineering: A Practical Approach, A. R. Rees et al. (eds), pp. 277-301, Oxford Press, London, 1992. Similarly tumor cells or sickled cells transfected with and expressing SAgs and other molecules given in Tables I and II are also transfected with nucleic acids encoding RGD which facilitates their localization to tumor microvasculature. These conjugates or transfectants are administered i.v. and localize to the tripeptides' integrin receptors situated on the tumor microvasculature. Neovascular endothelial cells to which these constructs have been targeted are transfected by SAg-encoding DNA so that they express or secrete SAgs locally. This induces potent local T cell activation and engender a tumoricidal immune response. Protocols for use of such conjugates, i.e., (1) naked SAg DNA conjugated to the integrin-binding peptides or (2) naked SAg DNA conjugated to phage that display the integrin-binding peptides, and transfectants in the induction of anti-tumor immune response are described in Examples 7, 15, 16, 18-23, 31.

[1047] Nucleic Acid and Nucleoprotein SAg Mimics

[1048] SAgs are often incapable of homing to tumor cells expressing SAg receptors in vivo because of the existence of naturally occurring SAg-specific antibodies and the affinity of SAgs for class II receptors on a wide variety of cells. To solve this problem, DNA chromatography is used to identify oligonucleotides instead of SAg peptides that bind to SAg receptors which are naturally expressed on tumor cells. The SAg receptor-specific oligonucleotides are conjugated to a SAg peptide with a functional TCR or NKT cell binding site. Oligonucleotides are also substituted for peptides in the SAg molecule which bind to MHC class receptors and naturally occurring SAg-specific antibodies. These conjugates are used to target SAgs to tumor cells in vivo that either endogenously express a SAg receptor or are pre-transfected with nucleic acid encoding a SAg receptor.

[1049] These peptide-oligonucleotide complexes are prepared by chemical conjugation methods well known in the art. Such receptor specific oligonucleotides may have several fold greater affinity for the SAg receptor compared to the native SAg. While these peptide-oligonucleotide complexes are used predominantly in vivo to target tumor cells bearing SAg receptors, they are also used ex vivo to stimulate T cells to become tumor specific effector cell which are useful for adoptive immunotherapy of cancer (Example 7, 15, 16, 18-23).

[1050] In appropriate recombinant bacteria, nucleic acids encoding the SAg receptor binding site expressed on tumor cells are fused to nucleic acids encoding SAgs. The resultant SAg polypeptide construct consists of the amino acid sequence of a SAg and its SAg receptor binding site (which is overexpressed if desired). The SAg with its expressed or overexpressed SAg binding site is useful in targeting tumor cells expressing SAg receptors after administration to a tumor-bearing host.

[1051] In a related construct, the nucleic acid encoding a SAg with an overexpressed SAg receptor specific binding site is fused to the nucleic acid encoding a native or chimeric SAg with its binding site for naturally occurring antibodies and its MHC class II binding site removed, mutated or replaced by peptides from another SAg against which there are no known naturally occurring antibodies. The TCR binding and activating region of this molecule is conserved. This resulting SAg polypeptide molecule binds to SAg receptors on tumor cells but also retains its capacity to activate the TCR. It is administered parenterally or orally to a tumor bearing host (orally to a colon carcinoma patient) and will effectively target tumor cells with SAg receptors (such as colon carcinoma cells) without being diverted by naturally occurring antibodies or class II receptor bearing cells present in whole blood. As such, this construct is useful in producing an anti-tumor effect when administered to a tumor bearing host as in Example 18-23).

[1052] Using DNA chromatography techniques, nucleic acid specific for SAg receptors on tumor cells are identified. These nucleotides are conjugated to SAg polypeptides which are optionally devoid of class II binding sites and naturally occurring antibody binding sites but with conserved TCR binding and activating sites. These constructs are useful in targeting tumor cells bearing SAg receptors in vivo while retaining SAg amino acid sequences specific for the TCR which are capable of producing a tumor specific T cell population effective in adoptive immunotherapy of cancer. The selected amino acid sequences are deleted, replaced or added to the SAg molecules using molecular cloning and site directed mutagenesis techniques well established in the art.

### EXAMPLE 7

[1053] General Ex Vivo Immunization Methods to Produce Tumor Specific Effector Cells for Adoptive Immunotherapy of Cancer

[1054] Several days (3 to 60 days) after intratumoral immunization with a nucleic acid construct described herein, tumor draining lymph nodes are removed and placed in tissue culture.

[1055] These cells are further expanded in vitro with SAg polypeptide for 2-4 days and/or IL-2 in vitro for a total of 3-15 days. These T cells are then harvested and reinfused into the host. T effector cells produced after in vivo immunization with nucleic acid encoding a SAg are expected to display potent anti-tumor activity.

[1056] Cells transfected ex vivo, are administered to the host wherein they activate lymphocytes in a number of ways. In one embodiment, the initial step involves in vivo immunization of hosts using various transfectants and constructs as described in Table II. The transfected cells are introduced into the host tumor, a nearby region, subcutaneously in close proximity to regional lymph nodes, or the lymph nodes draining the tumor. Transfected cells types, constructs and agents used in this step are given in Table II. Tumor cells are irradiated or treated with mitomycin C after transfection with nucleic acid encoding a SAg and/or another polypeptide so that polypeptides are expressed and fixed on the cell surface and the tumor cells do not proliferate when administered to the host.

[1057] In another embodiment, the initial step involves in vivo immunization of the tumor bearing host with transfectants, constructs and cells as described in Table III. These agents are administered in close proximity to the regional lymph nodes with or without a bacterial adjuvant such as bacillus Calmette-Guerin (BCG) or Corynebacterium parvum. The lymph node cells are harvested 10 days later and tissue cultured for further in vitro immunization/stimulation with SAg or SAg expressing cells that, optionally, coexpress a tumor associated antigen, costimulatory molecule or antigen presenting molecule.

[1058] Cryopreserved autologous tumor cells for subsequent tumor vaccination and culture are obtained from patients. Fresh resected tumors are dissociated under sterile conditions into single cell suspensions by mechanically mincing tumor into 5-mm3 pieces followed by enzymatic digestion. Generally, 1 gm of tumor is digested in a minimum volume of 40 ml of an enzyme mixture consisting of Hank's balanced salt solution (HBSS) containing 2.5 units/ml of hyaluronidase type V, 0.5 mg/ml of collagenase type IV, and 0.05 mg/ml of deoxyribonuclease type I (all commercially available from Sigma Chemical Co.; St. Louis, Mo.). The digestion is performed at room temperature with constant stirring in a trypsinizing flask for 2 to 6 hours.

[1059] The resulting cell suspension is filtered through a layer of No. 100 nylon mesh (Nytek: TETKO, Inc.; Briarcliff Manor, N.Y.) and cryopreserved in 90% human AB serum (GIBCO; Grand Island, N.Y.) plus 10% dimethyl sulfoxide (Sigma) at −178° C. in liquid nitrogen for subsequent immunization and culture.

[1060] Tumor cells are used in native form, with dinitrophenyl (DNP) or other haptens conjugated to them and then irradiated or treated with cytostatic drugs prior to use. Optionally, the tumor cells are transfected with nucleic acid encoding a SAg, and/or tumor associated antigen, and/or antigen presenting molecule, and/or costimulatory molecule, and/or adhesion molecule, and/or xenogeneic antigen, and/or carbohydrate modifying enzyme. The nucleic acid is introduced by methods given previously. The cells are then irradiated to a dose of 25 Gy or treated or with cytostatic drugs, viable cells counted by trypan blue exclusion and the cells resuspended so that a volume of 0.2 to 0.4 ml contains 1-2×10⁷ with or without ⁷ colony forming units of fresh frozen TICE BCG.

[1061] Patients are vaccinated intradermally (i.d.) at two sites approximately 10 cm from superficial inguinal lymph nodes. If necessary, axillary lymph nodes are used. Lymph node regions with previous dissections or clinical evidence of tumor are avoided.

[1062] Accessory cells including DCs, fibroblasts, endothelial cells, monocytes, and macrophages are used after transfection with nucleic acid encoding a tumor associated antigen, and/or SAg, and/or xenogeneic antigen, and/or carbohydrate modifying enzyme. If desired, these accessory cells or APCs are transfected with recombinant viral vectors containing nucleic acid the encode a SAg, and/or tumor associated antigen, and/or costimulatory molecule, and/or antigen presenting molecule, and/or costimulatory molecule, and/or adhesion molecule, and/or xenogeneic antigen. These cells need not be irradiated prior to administration. These cells are administered using the same cell numbers given above with or without BCG.

[1063] Alternatively, patients are vaccinated with various tumor associated antigens and other agents as described in Table II. The agents are bound to MHC class I, class II or CD1 receptors or to cells expressing these receptors. They are also given alone in doses ranging from 0.1 to 10 mg emulsified in various adjuvants well described in the art. A vaccination course includes up to 6 inoculations of the above agents at 1-3 week intervals.

TABLE III
Single Step in vivo Immunization of Tumor Bearing Hosts with SAg
Nucleic Acids Alone. Combined with Nucleic Acid Encoding Other
Peptides and SAg Nucleic acids Conjugated to Polypeptides or Liposomes

I. Intratumoral injection of nucleic acid

| | |
|---|---|
| 1. | Direct injection of SAg nucleic acids into tumor. |
| 2. | Direct i.v. or intra-arterial injection of SAg nucleic acids into tumor |
| | microvasculature. |
| a. | SAg nucleic acids conjugated to a polypeptide ligand specific for a |
| | tumor cell, tumor stromal cell, tumor microvascular or neovascular |
| | cell receptors |
| b. | Nucleic acid within liposomes containing a monoclonal antibody. |
| 3. | Recombinant viruses containing nucleic acid. |
| a. | Inactivate the virus in the host with gancyclovir |

II. After in vivo immunization (3-14 days), harvest regional lymph nodes
and place in tissue culture.
III. Activate and expand lymphocytes.

| | |
|---|---|
| 1. | Treat with SAg for 2 days. |
| 2. | Treat with IL-2 for 3 days. |

IV. Inject tumor specific effector T cells into host.

[1064] Regional lymph node cells draining tumor sites, lymphoid cells obtained after the above priming, peripheral blood T cells, and tumor infiltrating lymphocytes (TILs) are suitable sources of T cells that are activated to function as effector cells (T cells activated against the cancer cells). T cells are obtained from tumor infiltrating lymphocytes either before or after tumor vaccine immunization in vivo by the methods described herein. Approximately 10 days after in vivo immunization, an enlarged draining lymph node is removed and cultured. An immunized lymph node used herein is exemplary. A single cell suspension of lymph node cells is obtained by mechanical dissociation. Briefly, lymph nodes are minced into 2 mm 3 pieces in cold HBSS with a scalpel. The fragments are then pressed through a stainless steel mesh with a glass syringe plunger. The resultant cell suspension is filtered through nylon mesh and washed in HBSS. Cultures are established in 300-ml culture bags (Livecell Flasks; Fenwal, Deerfield, Ill.) with 200 to 250 ml of culture medium (CM: RPMI 1640 with 10% human AB serum, 2 mM fresh L-glutamine, 1 mM sodium pyruvate, 100 mg/ml of streptomycin, and 50 mg/ml of gentamicin all from GIBCO; Grand Island, N.Y.), containing 1-2×10⁵ lymph node cells/ml and 1-4×10⁵ irradiated (60 Gy) tumor cells/ml. Optionally, the lymph node cells are further separated into populations CD4+CD8+ T cells, NKT cells and/+ T cells. Some SAg complexes are presented bound to MHC class II receptors and some such as SAg-LPS complexes or SAg-glycosylceramide complexes are presented bound to CD1 receptors either free or on APC cell surfaces.

[1065] After 24 hours, various SAgs or SAg transfected cell types (STCT) given in Table III are added in doses of 10⁵ to 10⁷ cells for 8-72 hours. The cells are harvested and used for in vivo administration at this point. Specific cell populations are selected such as those having a particular TCR V profile or expressing CD44 using magnetic beads or other separation techniques well known in the art. Optionally, the SAg activated T cells are expanded. Recombinant IL-2 (Cetus, Emeryville, Calif.: provided by Cancer Treatment Evaluation Program, National Cancer Institute) is added at the initiation of the cultures at a concentration of 600 IU/ml (1 Cetus unit=6 IU of IL-2). Culture bags are incubated at 37° C. in humidified 5% CO2. Cell counts from aliquots obtained from random bags are followed to observe lymphoid cell proliferation. Lymph node cells are harvested when cells reached maximal density, usually after a total of 5-7 days in culture followed by IL-2 at 24 IU/ml for 3 days. These intervals are shortened depending on the cell viability, CD44 expression, or V expression or other conditions that adversely affect survival, viability, or therapeutic success.

TABLE IV
Two Step in vivo/in vitro Methods and Agents for Producing Tumor
Specific Effector T cells

A. In vivo immunization with SAg transfected tumor cells, accessory cells,
or virus.
1. Tumor cells transfected with:
a. Nucleic acid encoding a SAg
b. Nucleic acid encoding a tumor associated antigen
c. Nucleic acid encoding a carbohydrate modifying enzyme
. Accessory cells transfected with:
a. Nucleic acid encoding a SAg
b. Nucleic acid encoding a tumor associated antigen
c. Nucleic acid encoding a carbohydrate modifying enzyme
d. Nucleic acid encoding an MHC molecule
3. Recombinant viruses containing:
a. Nucleic acid encoding a SAg
b. Nucleic acid encoding a tumor associated antigen
c. Nucleic acid encoding a carbohydrate modifying enzyme
d. Nucleic acid encoding an MHC molecule
B. *In vivo immunization with:
1. Irradiated tumor cells.
2. Tumor associated antigens.
3. Irradiated tumor cells conjugated with DNP.
4. Tumor associated antigen/SAg conjugate or fusion polypeptides.
5. Naked nucleic or plasmid or phage displayed nucleic acid encoding
a SAg or attached to liposomes or albumin microspheres.
6. Naked or plasmid or phage displayed nucleic acid encoding a SAg/
tumor associated antigen polypeptide conjugate.
7. Tumor cells or accessory cells transfected with nucleic acids encoding
structures given in Table I Group IA, (pages 5 and 6) GM-CSF, IL-2
and other cytokines. (Berns, AJM. et al., Human Gene Therapy 6:
347-368 (1995).
8. Tumor cells transfected with nucleic acids encoding chemokines (T and
NKT cell chemoattractants) and granulocyte chemoattractants (C3a,
C5a, MAP).
9. SAg naked DNA fused or in mixture with DNA or structures non-
transfected given in Table 1 IA B and C (pages 5 and 6)
• In vivo immunization may be by various routes, e.g.,, i.d., i.m., or as
organoids or in adjuvants proximate to regional lymph nodes e.g.,
inguinal lymph nodes. For tumor peptide genes an ISS is useful as is
cotransfection of MHC class I genes. For SAg and tumor associated
antigen genes, the ISS is useful.
C. Lymphoid cells from draining lymph nodes are harvested 3-21 days
later and placed in tissue culture for further stimulation. They are
divided into T cell, NKT cell and / T cell populations. Alternatively,
T cells, NKT cells and / T cells are obtained from the peripheral blood
and also placed in tissue culture for further stimulation.
D. In vitro stimulation of T or NKT cell populations to produce tumor
specific effector cells as described in “C” is carried out with STCT
(SAg transfected cell types) or with constructs alone or applied to
appropriate receptors on APCs. MHC class II APCs are used for
presentation of SAg constructs. APCs expressing mannose, or CD1 or
CD14 receptors are used for presentation of glycosylated SAg, SAg-
LPS complexes, SAg-peptidoglycan complexes or SAg-
glycosylceramide complexes. Isolated MHC class I, class II, mannose,
CD1 or CD14 receptors immobilized on solid supports such as
polystyrene plates may be used in place of APCs methods well known
in the art. In this form had bind corresponding ligands in the constructs
given for presentation to T cells or NKT cells. STCT include tumor
cells, accessory cells, antigen presenting cells, prokaryotic cells,
autologous, allogenic or xenogenic cells lines and viruses. Accessory
cells include the following: DCs, monocytes, macrophages, endothelial
cells, fibroblasts and NK cells. These cells are transfected with nucleic
acids encoding SAgs in combination with the nucleic acids given
below. These nucleic acids may include the ISS sequence; SAg genes
may be used with or without the ISS sequence.

[1066] form they bind corresponding ligands in the constructs given above for presentation to T cells or NKT cells. STCT include tumor cells, accessory cells, antigen presenting cells, prokaryotic cells, autologous, allogeneic or xenogeneic cells lines and viruses. Accessory cells include the following: DCs, monocytes, macrophages, endothelial cells, fibroblasts and NK cells. These cells are transfected with nucleic acids encoding SAgs in combination with the nucleic acids given below. These nucleic acids may include the ISS sequence; SAg genes may be used with or without the ISS sequence.

[1067] Antibodies or Fab fragments having specificity for CTLA-4 are added with or without IL-2 at any point to expand the T cell population and avert apoptosis. The cells are washed once at the end of STCT incubation and before the addition of IL-2 and/or anti-CTLA-4 antibodies.

TABLE V
Ex vivo Modes of Antigen Presentation to T Cells or NKT Cells to Produce
Tumor Specific Effector Cells

A. Tumor Cells, Accessory Cells, Accessory Cell/Tumor Cell Hybrids, e.g., DC/Tumor
Cell) Transfected with:

| | |
|---|---|
| 1. | SAg-encoding nucleic acid |
| 2. | SAg-encoding nucleic acid and tumor associated antigen nucleic acids (to include arrays |
| | of tumor associated epitopes) |
| 3. | SAg nucleic acid and MHC class I or II nucleic acids. |
| 4. | SAg-encoding nucleic acid and co-stimulatory nucleic acids. |
| 5. | SAg-encoding nucleic acid and adhesion molecule nucleic acids. |
| 6. | SAg-encoding nucleic acid and a-galactosyltransferase synthetic nucleic acids or |
| | xenogeneic species specific nucleic acids. |
| 7. | SAg-encoding nucleic acid and chemoattractant nucleic acids |
| 8. | SAg-encoding nucleic acid and glycosylceramide synthesis nucleic acids |
| 9. | SAg nucleic acid and lipopolysaccharide synthesis nucleic acids |
| 10. | SAg-encoding nucleic acid and microbial lipoprotein or polysaccharide or peptidoglycan |
| | membrane or capsular synthesis nucleic acids |
| 11. | SAg-encoding nucleic acid and SAg receptor nucleic acids |
| 12. | SAg-encoding nucleic acid and CD1 receptor synthesis nucleic acids |
| 13. | SAg-encoding nucleic acid and CD14 receptor synthesis nucleic acids |
| 14. | SAg-encoding nucleic acid and SAg promoter and/or global regulator nucleic acids |
| 15. | SAg-encoding nucleic acid and oncogene and/or transcription factor nucleic acids |
| 16. | SAg-encoding nucleic acid and angiogenesis factor or receptor nucleic acids |
| 17. | SAg-encoding nucleic acid and growth factor receptor nucleic acids18. SAg-encoding |
| | nucleic acid and cell cycle protein nucleic acids |
| 19. | SAg-encoding nucleic acid and heat shock protein nucleic acids |
| 20. | SAg-encoding nucleic acid and chemokine nucleic acids |
| 21. | SAg-encoding nucleic acid and cytokine nucleic acids |
| 22. | SAg-encoding nucleic acid and tumor suppressor nucleic acids |
| 23. | SAg-encoding nucleic acid and antigen processing and trafficking nucleic acids |

B. Additional in vitro Stimulatory Agents (preferred receptor)

| | |
|---|---|
| 1. | Tumor peptides (Class I or Class II) |
| 2. | Tumor peptide-SAg conjugates or fusion proteins (Class I or Class II). |
| 3. | Lipopolysaccharide-SAg conjugate (Class II or CD14) |
| a. | arabinose |
| b. | mycolic acid |
| c. | teichoic acid |
| d. | muramic acid (Staphylococcal cell wall glycoprotein) |
| e. | mannan proteoglycans |
| f. | chondroitin-sulfate |
| 4. | Glycosylated SAgs. (Class II or mannose) |
| 5. | SAg-glycosylceramide conjugates (class II or CD1) |
| a. | GalCer conjugate |
| b. | αGal conjugate |
| 6. | SAg-proteosome conjugates |
| 7. | SAg or glycosylated SAg or SAg-glycosylcerantide conjugates or SAg- |
| | lipopolvsaccharide or SAg-peptidoglycan conjugates coupled to proteosomes |
| 8. | SAg or glycosylated SAg or SAg-glycosylceramide conjugates or SAg- |
| | lipopolysaccharide conjugates or SAg-peptidoglycan conjugates expressed on or coupled |
| | to liposomes |
| 9. | Conjugates having having a Superantigen component (polypeptide or nucleic acid) and a |
| | partner that is either a single component or a conjugate of 2 or more components |
| | (protein, carbohydrate, lipid DNA) as indicated below. |

Superantigen (Protein or DNA) Partner (Single Component or Conjugate)

| | |
|---|---|
| 1. | DNA coding sequence |
| 2. | Polypeptide |
| 3. | Nucleic acid |
| 4. | Tumor associated Peptide |
| 5. | Tumor Antigen-MHC protein |
| 6. | LPS |
| 7. | Lipoarabinomannan |
| 8. | Ganglioside |
| 9. | Glycosphingolipid |
| 10. | Ganglioside-CD1 receptor |
| 11. | Glycosphingolipid-CD1 receptor |
| 12. | Glycosylceramide (e.g., Gal-Cer) |
| 13. | GalCer-CDl receptor |
| 14. | Gal |
| 15. | Arg-Gly-Asp or Asn-Gly-Arg |
| 16. | iNOS |
| 17. | Gb2 or Gb3 or Gb4 |
| 18. | (Gb2 or Gb3 or Gb4)-CD1 receptor |
| 19. | -GPI-(Gb2 or Gb3 or Gb4) |
| 20. | -GPI-(Gb2 or Gb3 or Gb4)-CD1 receptor |
| 21. | Verotoxin |
| 22. | Verotoxin A or B Subunit |
| 23. | TFNa receptor peptide homologous to VT |
| 24. | CD19 peptide homologous to VT |
| 25. | LDL, VLDL, HDL, IDL |
| 26. | Apolipoproteins (e.g., Lp(a), apoB-100, apoB-48, apoE) |
| 27. | OxyLDL, oxyLDL mimics, (e.g., 7b-hydroperoxycholesterol, 7b- |
| | hydroxycholesterol, 7-ketocholesterol, 5a-6a-epoxycholesterol, 7b- |
| | hydroperoxy-choles-5-en-3b-ol, 4-hydroxynonenal (4-HNE), 9-HODE, |
| | 13-HODE and chlolesterol-9-HODE) |
| 28. | OxyLDL by products (e.g. lysolecithin, lysophosphatidyicholine, |
| | malondialdehyde, 4-hydroxynonenal) |
| 29. | LDL & oxyLDL receptors (e.g., LDL oxyLDL, acetyl-LDL, VLDL, |
| | LRP, CD36, SREC, LOX-1, macrophage scavenger receptors) |
| 30. | phytosphingosine, -GPI-phytosphinosine |
| 31. | tumor associated lipid antigens |
| 32. | glycolipid, proteolipid, glycosphingolipid, sphingolipid |
| | with inositoiphosphate-containing head groups, |
| | phytoglycolipids, mycoglycolipids, -GPI-sphinosines or |
| | GPI-lipids |
| 33. | sphingolipids with inositoiphosphate-containing head |
| | groups having the general structure: |
| | ceramide-P-myoinositol-X with X referring to polar |
| | substituents comprising ceranude-p-inositol-mannose, |
| | inositol-1-P-(6)mannose(al,2inositol-1P-(1)ceranude, |
| | (inositol-P)2-ceramide, inositol-P-inositol-P-ceranude, |
| | inositol-P-inositol-P-ceramide. |
| 34. | tumor associated glycan antigens consisting of |
| | peptidoglycans or glycan phosphotidyinositol (GPI) |
| | structures |

C. STCT or SAg-tumor peptide conjugates are incubated with in vivo immunized T cells or
NKT cells for 24 days and then with IL-2 for 2-5 days.
D. The tumor specific effector cells are then harvested and injected in doses of 10¹⁰-10¹²
every 3-7 days for 1-6 treatments.
E. Viruses are transfected into tumor cells, accessory cells, antigen presenting cells,
allogeneic or xenogeneic cells. They are pre-programmed with DNA for SAgs alone or in
combination with genes given in D. They may also utilize the host genome to produce a new
gene product as for example the host -galactosyltransferase. Viruses may include the following:

| | |
|---|---|
| 1. | Adenoviruses. |
| 2. | Vaccinia virus. |
| 3. | Equine encephalitis virus. |
| 4. | Influenza virus. |

F. In an additional method, tumor associated antigens are bound to MHC class I positive
cells and used to activate T cells. SAg-lipopolysaccharide complexes and SAg-glycosylceramide
complexes are bound to CD1 or class II receptors on APCs. In addition, SAg-lipopolysaccharide
complexes or SAg-glycosylceramide complexes are presented bound to class II positive APCs.
Alternatively, unbound tumor associated antigen/SAg conjugates or fusion products are added at
a 0.1 to 200 mg/ml dose for 2 days. This is followed by STCT incubation or by native or mutant
SAg treatment for 2 days.

[1068] For comparative analysis, peripheral blood lymphocytes (PBL) are obtained from patients the same day as the lymph node harvest. PBL are isolated by Ficoll-Hypaque gradients from 60 ml of heparinized blood samples. The PBL are placed in culture utilizing 24-well tissue culture plates at the same cell density as lymph node cells. PBL are harvested at maximal cell density and characterized by phenotype analysis and cytotoxicity. T cells, NKT cells, and NK cells are isolated by well known methods described in the art (Colligan, J E et al., eds, Current Protocols in Immunology, John Wiley, New York, 1996).

[1069] PBL are separated by Ficoll/hypaque sedimentation. Cells are recovered from the interface, washed in PBS, and pelleted. Peripheral blood mononuclear cells enriched for MHC class I molecules or MHC class II molecules are used to bind tumor associated antigens or tumor associated antigen/SAg conjugates for in vitro or in vivo immunization.

[1070] Cryopreserved groups of autologous PBMCs are thawed, washed twice in PBS, resuspended at 5 to 8×10⁶ cells/ml in CM and pulsed with 1 mg/ml peptide in 15 ml conical tubes (5 ml/tube) for 3 hours at 37° C. These PBMC stimulators are then irradiated at 3000 rads, washed once in PBS, and added to the responder cells at responder stimulator ratios ranging between 1:3 and 1:19.

[1071] Tumor infiltrating lymphocytes are isolated from fresh surgical biopsies. Briefly, tumor tissues are minced into 1-mm3 pieces that are then dissociated into single cell suspensions in Dulbecco's modified minimum essential medium (Gibco; Grand Island, N.Y.) supplemented with 10% heat-inactivated human AB serum (NABI, Miami, Fla.), 0.05% collagenase (type 4; Sigma Chemical Co., St. Louis, Mo.), and 0.002% DNase (type 1; Sigma) on a magnetic stirrer for 1 hour. Subsequently, the tissue digests are washed and passed through a nylon mesh and tumor infiltrating lymphocytes and tumor cells are separated on discontinuous (75%/100%) Ficoll/Hypaque gradients.

[1072] Lymph node lymphocytes are obtained by mechanical dissociation of tissues, followed by washing in medium and centrifugation on Ficoll/Hypaque gradient [Newell K A, et al., Proc. Natl. Acad. Sci. USA, 88:1074 (1991)]. Cryopreserved suspensions of tumor cells/tumor infiltrating lymphocytes are defrosted, washed, and separated by allowing tumor cells to adhere to the surface of plastic wells. The recovered non-adherent tumor infiltrating lymphocytes are transferred to 6-well plates and cultured in serum-free AJM-V medium (Gibco) supplemented with 6,000 U/ml of IL-2 (Cetus-Chiron, Emeryville, Calif.) for 8 days. Tumor cells are cultured as adherent monolayers in Dulbecco's modified Eagle's medium (DMEM, Gibco) supplemented with 10% (v/v) of fetal calf serum. Any activated lymphocytes can be used in the method given above. In a preferred embodiment, lymphocytes expressing a predominant TCR V phenotype in tumor tissue or peripheral blood before or after treatment are isolated and expanded by standard procedures.

[1073] Antibodies to various TCR Vβ subsets are immobilized on inert solid supports and incubated with blood cells and/or tissue cells to include bone marrow and peripheral blood or lymphoid tissue cells and tumor infiltrating lymphocytes. The bound T cells are eluted with various buffers. Suitable biocompatible inert supports include polystyrene, polyacrylamide, nylon, silica, and charcoal as well as others known in the art. The supports are derivatized for covalent binding of antibodies with agents well known in the art including heterobifunctional compounds, carbodiimide, and glutaraldehyde. The enriched population of V-bearing T cells is then used for in vitro immunization with a SAg in native or mutant form capable of activating the dominant TCR Vβ bearing lymphocytes. IL-2 is used to further expand the cell population as described above.

[1074] Effector lymphocytes obtained after in vivo sensitization are stimulated in vitro with tumor associated antigens bound to irradiated PBMC (which act as stimulator cells) for 8-72 hours. DCs, macrophages, or other class I-bearing cells are used to present the tumor associated antigens. The T cells are then analyzed for TCR Vβ and/or CD44 expression.

[1075] An STCT expressing a SAg is then added to the culture (1 picogram to 10 microgram). If a given V predominance is noted after antigen stimulation, then an STCT or SAg known for its ability to specifically stimulate that Vβ subset is selected for use in activation. Culture proceeds for 18-72 hours. The TCR Vβ and CD44 profile of stimulated T cells are then rechecked. IL-2 (12-25 IU) and/or anti-CTLA-4 antibodies are added for an additional 8-72 hours after which the cells are harvested for use. The optimal timing of STCT introduction after tumor antigen stimulation is between 3 and 14 days.

[1076] Antigen-presenting cells (APCs) of all kinds such as DCs, B cells or macrophages with appropriate MHC class II molecule binding sites for soluble SAgs are used or the SAgs are presented alone or in immobilized form without APCs. Optionally, STCTs are used without APCs. Before IL-2 administration, effector cells are re-stimulated weekly by washing and replating in 24 well plates at a concentration of 2.5×10⁵ cells/ml in CM. This is continued for 3-10 cycles until enough cells are available for IL-2 expansion. T cells are cloned 7 days after the several cycles of stimulation in 96-well round bottom plates at 0.3 cells/well with 5×10⁴ stimulator tumor antigen-PBMC, SAg, or STCT and 25-50 U recombinant IL-2 in a volume of 200 ml.

[1077] For long term growth, clones are transferred to 24 well plates and 1×10⁶ cells/well and stimulated weekly with SAg or STCT plus optimally 5×10⁵ tumor associated antigen-PBMC and 25-50 U/ml of IL-2. After clones grow to greater than 2×10⁶ cells, the clones are maintained by culturing with STCT only for 48 hours, washing to remove STCT, and replating in fresh media for 5-7 days with 25-50 U/ml L-2.

[1078] The initial incubation is with the selected tumor associated antigen such as MART-1 for 1-3 days with the latter reagents followed by V profiling and re-stimulation with SAg by methods given above. The MART-1 is presented attached to HLA-A1³⁰ cells of PBMC. Cytotoxic activity is tested after the first and/or second rounds of sequential stimulation with tumor associated antigen and SAg given below.

[1079] The tumor-specific effector T cell population is immortalized as tumor specific T cell hybridomas. These hybridomas are generated by immunization in vitro of human T cells as described herein. The expanded T cells are then fused to a thymoma and cloned by limiting dilution or other methods well known in the art. Cells are cultured in complete tumor medium composed of Eagle's minimal essential medium supplemented with 10 mM 2-mercaptoethanol, 10% fetal calf serum, 10% Mishell-Dutton Nutrient cocktail, 100 U/ml penicillin G, and 200 mg/ml streptomycin sulfate. Other well known culture media can also be used.

[1080] For SAg immunization in vitro, various antigen presenting cells are used including MHC class II-positive T cells as well as those expressing CD1. Purified MHC class II or CD1 molecules alone or immobilized are substituted for APCs in some cases. Moreover, T cells are activated by some SAgs without APCs when presented to T cells in immobilized form or in the presence of various cytokines such as IL-1, IL-2, IL-4, or IL-6 or xenogeneic antigens. Various costimulants such as B7-1 and B7-2, adhesion molecules such as ICAM-1 and VCAM-1, or GalCer are used together with SAgs and MHC class II positive APCs or immobilized MHC class II peptides to augment the T cell or NKT cell response.

[1081] Tumor associated antigen immunization is also involved in the binding of peptides to MHC class I bearing APCs of multiple origins. Various cytokines including, but not limited to, IL-1, IL-2, IL-4, IL-12, or LPS are used in vitro or in vivo to expand the antigen specific clone of T cells and avert the development of T cell anergy.

[1082] Specialized Forms of Tumor Specific Effector Cells and Hybridomas

[1083] Tumor specific T or NKT cells with TCR Vβ and/or CD44 selectivity are produced by transfecting uncommitted stem cells with nucleic acids encoding particular TCR Vβ chains. Likewise, a T cell clone overexpressing CD44 is produced by transfecting T cells with nucleic acids encoding CD44. A hybridoma expressing a tumor associated antigen with a dominant TCR Vβ phenotype or CD44 expression is produced in this way. Such a T cell hybridoma or cell line is stimulated exogenously by a SAg or a SAg mutant with a TCR Vβ or CD44 selectivity corresponding to that expressed predominantly by the T cell hybridoma. The result is a clone of tumor specific T cells capable of being expanded by exposure to SAg in vitro or in vivo.

[1084] CD44 expression is induced in a T cell, NKT cell or TCR/T cell population after activation in vitro or in vivo with SAgs alone or together with any of the T or NKT cell stimulating constructs and methods described herein. The in vivo and in vitro activation steps and immunization protocols are given in Examples 7, 15, 16, 18-23. The CD44 positive T cell population exhibits upregulated primary adhesion properties and is capable of effectively trafficking and homing to tumor cells in vivo and particularly to sites of SAg (in native or nucleic acid form) injection i.e. tumor Nucleic acids encoding CD44 or a carbohydrate modifying agent will induce CD44 expression on the T cell surface. A preferred in vivo method of use involves intratumoral injection of SAg DNA into tumor sites which induces expression of CD44 on T cells resulting in enhanced T cell trafficking to the site of SAg administration.

[1085] T cells are genetically engineered to overexpress CD44 after SAg stimulation. This is accomplished by transfection of T cells or NKT cells with nucleic acid encoding CD44 as well as nucleic acids encoding glycosyltransferases. This results in the overexpression of CD44 upregulation of the adhesive properties of CD44. Such CD44 enriched clones are harvested after SAg stimulation, enriched, and administered for adoptive immunotherapy of cancer (Examples 6, 7, 15, 16, 18-23).

[1086] Additionally, T or NKT cell clones or hybridomas are produced which express a chimeric TCR consisting of an invariant chain with specificity for GalCer or and a chain that binds a SAg. The Vβ region which is specific for the SAg is overexpressed on the TCR permitting greater responsiveness to exogenous SAg. This chimeric TCR recognizes and is stimulated by an exogenous SAg with a TCR Vβ selectivity corresponding to the predominant TCR Vβ phenotype of the T or NKT cell. Such T or NKT cell lines are cloned and hybridomas produced by methods well known in the art. (Current Protocols in Immunology, pp. 7.21.-7.21.9 John Wiley, New York, 1991) The expanded clone of tumor specific T cells produced in this way is useful for adoptive immunotherapy of cancer by methods given in Examples 7. 15, 16, 18-23.

[1087] T cell clones are produced due to asynchronous TCR Vβ locus rearrangements at low but significant frequency in which both TCR V segments are part of two functional TCRs. Such clones are produced from uncommitted stem cells in which nucleic acid encoding two chains are transfected, one having specificity for a tumor associated antigen and another having SAg specificity. Hence, a clone of T cells with dual V TCR expression is produced which is capable of reacting with a tumor specific and a SAg. This clone is expanded by binding either or both ligands. These expanded clones consisting of tumor specific effector T cells are used for adoptive immunotherapy of cancer by protocols given in Examples 7, 15, 16, 18-23).

[1088] T cells or NKT cells clones or hybridomas expressing TCR Vα and Vβ chains with specificity for GalCer and SAg, respectively, are produced by fusion of NKT cell DNA encoding the GalCer and SAg receptors with DNA from an appropriate thymoma. This GalCer receptor and SAg receptors are expressed on the and chain of the TCR, respectively. Upon exposure to GalCer or SAg, these cells are further activated to express CD44 which enhances their homing and adhesive properties. NKT or T cells expressing high levels of IFNγ, GM-CSF, and IL-10 are selected and cloned. The clone of T cells producing IFNγ and expressing GalCer, SAg and CD44 is then expanded and immortalized. With its properties of tumor recognition, SAg and glycosylceramide activation, IFNγ production and effective in vivo trafficking, this T or NKT effector cell population is preferred for adoptive immunotherapy of cancer by methods given in Examples 7, 15, 16, 18-23).

[1089] Additional measures to avert apoptosis and augment proliferation capacity in SAg activated T cells include the use of anti-CD28 antibodies and inhibition of CTLA-4 on T cells. CTLA-4 on T cells is blocked by specific antibodies or fragments.

[1090] Alternatively, a T cell clone is used in which CTLA-4 is genetically deleted. When stimulated by SAg, these cells proliferate to a greater extent compared to SAg alone. Cell populations in which CTLA-4 is deleted or blocked are selected to have a predominant Vβ bearing lymphocyte population that is activated after in vivo or ex vivo tumor associated antigen stimulation. After CTLA-4 deletion or blockade, the appropriate SAg with Vβ selectivity is chosen to expand this population. To avert uncontrolled proliferation in vivo, the thymidine kinase gene of the HSV is co-transfected to enable elimination of these cells in vivo if desired.

[1091] Measures to produce an effector T cell population with an overexpressed TCR Vβ and/or Vβ chains specific for a given SAg involve the transfection of nucleic acids encoding the desired Vβ or Vβ regions into T cells as in Example 1. To lower the activation threshold of the T cell or NKT cells to SAg or SAg-tumor peptide-MHC or CD1, the T cell or NKT cells are transfected with nucleic acid encoding a tyrosine kinase or other signal transduction initiating molecules which can dimerize in the membrane with the TCR tyrosine kinases thereby lowering the threshold for activating the signal transduction pathway. The deletion of the signal transduction inhibitory region of the TCR to produce sustained signal transduction is done by site directed mutagenesis as in Example 24.

### EXAMPLE 8

[1092] Prevention of Anergy in T or NKT Tumor Specific Effector Cells

[1093] The SAg stimulated tumor specific effector T cells used for adoptive immunotherapy of cancer may not function when infused unless measures are taken to prevent T cell anergy or activation-induced cell death (AICD) by interdicting the Fas mediated pathway. The Fas ligand (FasL) has been identified as a type II transmembrane polypeptide of the TNF family. These two related receptor-ligand systems signal apoptosis through closely related but distinct pathways. T cell phenotypes that have diminished expression of Fas or FasL show delayed anergy induction and shortened periods of non-reactivity compared to Fas-expressing cells. Activation-induced cell death (AICD) induced by SAgs in vitro or in vivo is averted using Fas-deficient T cells, including those with down-regulated Fas or FasL receptors as well as those with masked or blocked Fas receptors. A Fas-IgG fusion protein is added during the SAg activation phase to prevent AICD or anergy induction. Measures such as those above (or by treating with anti-CTLA-4 antibodies or activation of CD28 before, during, or after STCT stimulation) protect T cells from anergy or AICD. In this way, these manipulations prolong T cell survival in vitro and enhance tumoricidal activity in vivo after the T cells are activated by tumor associated antigen plus SAg or tumor associated antigen-SAg conjugates in vitro.

[1094] SAg nucleotide alone or fused to tumor peptide nucleotide may be further fused with an antisense nucleotide capable of inhibiting the apoptosis pathway. When expressed in T cells, this combination of genes would promote the generation of tumor specific effector T cells which would be resistant to AICD. Oligonucleotide antisense molecules that inhibit key steps leading to apoptosis may be fused to SAg DNA in order to prevent the T cells from undergoing AICD. SAg DNA may also be fused with the multi-drug resistance (MDR) gene to make the T cells refractory to chemotherapeutic agents and sensitive to anti-apoptosis drugs. Certain drugs or radiation may be used together with SAg DNA for additive or synergistic inhibition of the apoptosis pathway in the doubly or multiply transfected T cells.

[1095] SAg DNA may also be linked operatively to promoter genes such as those inducible by corticosteroids or heavy metals (e.g., the metallothionein promoter) and regulatory DNA sequences that act as T cell on/off sensors responsive to exogenous cytokines, inflammatory stimuli and changing external conditions such as oxygen tension and pH. A particular advantage of SAg DNA is that its expression will promote V receptor downregulation and internalization so that these receptors are unavailable to exogenous SAg. SAg DNA is modified in several ways to introduce protein binding sites for key transcriptional elements which may inhibit apoptosis. Insertion of such sites at the bending domains of SAg oligonucleotides renders them capable of inducing key TH-1 cytokines and cell proliferation while averting AICD.

[1096] SAg DNA is also capable of reversing the T cell anergy and signaling defect which may be localized to the chain in cancer patients. This is accomplished by providing transcriptional binding sites on the SAg DNA which bypass the conventional chain activating signals and the pathway to IFN and IL-2 production. In the same way, SAg DNA also bypasses the defective signal by activating a complex that contains STAT-1 which binds a GAS-like palindromic sequence located in the IFN response region of the FcRI gene. Such anergy in T cells may also be reversed by alternate cytoplasmic tails that are activated by SAg binding to the TCR V and V chains. Moreover, nucleic acid encoding Protein A and especially domain D (that binds to the Ig VH3 region) may be fused to SAg DNA in order to bring about activation of the IL-2 and IFN genes that resulting in T cell proliferation and IFN production coupled with up-regulated surface receptors for the Ig VH3 domain.

[1097] Anergy in SAg-activated tumor-specific T or NKT effector cells (or hybridomas) is known to be averted by in vitro or in vivo co-administration of IL-2, IL-1, LPS and tumor specific peptides specifically interfere with SAg driven anergy.

[1098] Methods and doses for use of these agents with SAg activated T or NKT cells are given in Examples 7, 15, 16, 18-23.

[1099] Tumor specific T or NKT effector cells or hybridomas prepared by various methods described above are administered according to the adoptive therapy protocol of Examples 7, 15, 16, 18-23 (the preferred method). The experimental tumor models and human cancers for which the anti-cancer efficacy of these cells can be demonstrated are provided in Example 16.

### EXAMPLE 9

[1100] Reactivation of Anergized Tumor-specific T or NKT Cells by SAg and SAg Receptors

[1101] Preferred tumor-specific effector cells for adoptive immunotherapy of cancer are autologous T cells. However, in the course of tumor growth, T cells become anergized to the host's own tumor and are incapable of an adequate immune response to the tumor. Dampened TCR-triggered responses are caused by suppression of effector molecules that couple cell surface receptors to early and late intracellular signaling events. For example, basal and induced tyrosine phosphorylation of many signaling proteins is reduced due to deficits at multiple points, including the inositol phosphatase pathway. This down-regulates cytokine production and decreases nuclear transcription factors of TH 1 helper cells.

[1102] Two functionally distinct signal transduction pathways are coupled to the TCR. Native or mutant SAgs activate anergic T cells via an alternate pathway without the conventional increases in Ca++ mobilization or detectable phosphatidylinositol hydrolysis that follow ligation of the TCR by peptide/MHC complexes. Native, mutant or derivatized SAgs are administered to stimulate anergized T and/or NKT cells to become tumor-specific effector cells now fully reactive against tumors. Such cells are used also in adoptive immunotherapy of cancer as described in Examples 7, 15, 16, 18-23. Nucleic acid constructs comprising DNA encoding SAg and SAg receptor are provided to reverse T cell anergy in cancer patients.

[1103] Anergic T (or NKT) cells transfected with DNA encoding a SAg receptor express the receptor on the cell surface. Binding of exogenous SAg to this receptor generates T cell activating signals, so that the activated T cells can be used for adoptive immunotherapy.

[1104] DNA encoding a SAg peptide is transfected into cancer patients' anergized T and/or NKT cells. These DNA constructs also contain the ISS (described above). The T and/or NKT cell transfectants have revitalized proliferative activity when stimulated by tumor-specific antigen and exogenous SAg. The cells are used for adoptive immunotherapy of cancer (Examples 7, 15, 16, 18-23).

[1105] Anergic T cells from cancer patients are transfected in vivo or in vitro, resulting in a population of tumor reactive effector T cells in vivo or ex vivo. The ex vivo transfected T cells are used for adoptive immune therapy as described in Example 15, 16, 18-23. In the case where SAg receptor is expressed by transfected T cells, these cells are activated by locally or systemically by SAgs to result in tumor-specific effector cells.

[1106] Additional manipulations that assist in restoring responsiveness to anergic T cells include removal of the (T or NKT) cells from the immunosuppressive microenvironment and transfer into tissue culture for a short period before stimulation with SAg. Furthermore, defective signaling in patient T or NKT cells may be reconstituted by transfection with DNA encoding CD3-2 or fyn that is either in a single construct with, or cotransfected with, DNA encoding SAg and/or SAg receptor. Now, surface activation of the SAg receptor triggers CD3-signaling and T cell proliferation.

[1107] SAg activation of a T cell surface ganglioside (such as GD3) is also used to reverse T cell anergy in cancer patients. SAg coupled to GalCer, lipopolysaccharides or proteosomes are even more effective in activating such anergized T cells. Coordinate activation of CD69 with phorbol esters in combination with SAg stimulation also reverses T cell anergy.

### EXAMPLE 10

[1108] Tumor Specific Effector T or NKT Cells as Lymphoid Organoids

[1109] Tumor specific T and/or NKT effector cells (or hybridomas with such cells) are prepared ex vivo in the form of a lymphoid organoid and implanted into tumor-bearing hosts. The organoid consists of the tumor specific lymphocytes either activated by SAgs, transfected to express SAg alone or in combination with the other proteins or anti-tumor moieties described herein. The cells are encased in semi-permeable membranes that allow for their progressive entry into the blood and lymphatics after implantation into the host. Such organoids are implanted preferentially at sites adjacent to lymphatics or blood vessels that drain organs or regions of known tumor involvement. However, they may also be implanted subcutaneously, intraperitoneally in addition to intra-tumorally or adjacent to a tumor site. The advantage of the organoid is that it continuously provides proliferating tumor-specific effector cells that recognize traffic to tumor sites in a physiological manner. This approach avoids negative selection, functional deficiencies and storage problems associated with long term cultured cells.

[1110] Organoids are encased in macrocapsules, sheaths, rods, discs, or spherical dispersions or microcapsules. Microcapsules are made of hydrogels such as polysaccharide alginate that are optionally coated with polyanions and again with alginate. Macrocapsule and vascular devices consists of acrylonitrile-vinyl chloride copolymers or cellulose nitrate membranes. In one approach, scaffolds composed of synthetic polymers serve as cell transplant devices. The polymers are degradable or non-degradable materials that disappear from the body after they perform their function to obviate concerns about long-term biocompatibility.

[1111] These devices serve as structural and functional tissue units by the transplanted cells. The open system implants are designed so that the polymer scaffold guides cell organization and growth and allows diffusion of nutrients and cells. The cell polymer matrix is pre-vascularized or becomes vascularized as the cell mass expands after implantation. Vascularization is induced naturally by the host or artificially by secretion of angiogenic factors from host cells. Optionally, the angiogenic proteins are genetically engineered into the host T cells in vitro before implantation or in vivo before or after implantation.

[1112] To maintain or facilitate targeting of the cells to tumors or involved organs, the lymphocytes are transfected with DNA encoding polypeptides that enhance homing and trafficking ability to the sites of tumor burden (e.g., brain, liver, lung). The organoid lymphocytes express no CTLA so that they may proliferate (in vitro and in vivo) without the need for exogenous IL2. Alternatively, cells are transformed to express herpes simplex virus thymidine kinase, making them susceptible to killing by gancyclovir. This curtails uncontrolled proliferation caused by the CTLA-4 deletion (or inhibition). Exogenous control of antitumor activity is achieved through the use of inducible promoters, such as those responsive corticosteroids or metals.

### EXAMPLE 11

[1113] Tumor Specific Effector Cells or Tumor Cells Expressing Protein A, Protein A Domains and/or Angiostatin

[1114] It is desirable to express Fc receptors (FcR) or Ig VH3 domains on tumor cells to promote binding by immunoglobulins and enhance damage by antibody dependent cellular cytotoxicity. By introducing Staphylococcal Protein A, or its domains A-D into tumor cells which overexpress FcR and VH3 the tumor cells bind immunoglobulins (including those with a/Gal specificity). Signaling of T cells occurs via high affinity binding to FcR (FcRI) of protein A-IgG complexes; such binding bypasses the CD3-blockade in tumor bearing patients. These transfected tumor cells are useful as a vaccine. Likewise, nucleic acids encoding protein A and its domains A-D are transfected into partially or fully anergized T or NKT cells of cancer patients. Exogenous immunoglobulins stimulate the generation of tumor-specific effector T or NKT cells which are used in adoptive immunotherapy (Examples 7, 15, 16, 18-23).

[1115] DNA encoding Staphylococcal protein A and its domain D are co-transfected into these tumor cells resulting in the joint surface expression of: (1) protein A and FcR to which it binds and/or (2) domain D and Ig VH3 to which it binds.

[1116] When DNA encoding protein A or domain D, fused to a signal sequences that route and anchor the protein A peptide to the tumor cell surface, is introduced into tumor cells, such tumor cells are excellent targets for parenterally administered SAg polypeptides (particularly those for which no natural antibodies exist). Tumor cells expressing protein A and domain D and also expressing FcRs on the cell surface, have heightened sensitivity to complement mediated lysis.

[1117] Tumor cells cotransfected to express protein A and Gal (by introduction of the appropriate glycosyltransferase) are capable of reacting with natural anti-Gal antibodies, Ig Fc fragments and Ig VH3 domains, which stimulate an enhanced tumoricidal response.

[1118] Angiostatin is a circulating angiogenesis inhibitor which is 38-kDa internal fragment of (mouse) plasminogen that contains the first four disulfide-linked kringle domains. In vivo, angiostatin suppresses neovascularization in several traditional assays (chick chorioallantoic membrane assay and mouse corneal assay). Proteases released by tumor cells cleave circulating plasminogen to generate angiostatin. Metalloelastase produced by tumor infiltrating macrophages generated angiostatin production by murine Lewis lung carcinoma. In the present invention, nucleic acid encoding angiostatin (Cao Y et al., J. Clin. Invest. 101: 1055-1063, (1998)) are cotransfected into tumor cells with nucleic acid encoding SAg (as in Example 1). The tumor cell cotransfectants express and secrete SAg and angiostatin. Such cells are used directly as a preventative vaccine (Example 8) or as a therapeutic vaccine to treat established tumor including micrometastases. Methods for using these cells in vivo are in Examples 7, 12, 16, 18-23.

[1119] In addition, tumor cells are cotransfected to express angiostatin and protein A (and/or its domains). Any nucleic acid construct shown in Table I may also be used in combination to transfect tumor cells together with protein A, its domains and angiostatin.

### EXAMPLE 12

[1120] SAg Receptor

[1121] Colon carcinoma is used as the tissue source for the SEB receptor. Mixtures of different detergents at low concentrations are used. The protocol for screening detergents for solubilization of MAChRs is readily adaptable to other receptor types. The membranes are suspended at 5-10 pH 7.5, 20 mM Tris-HCl, pH 7.5, or 20 mM sodium phosphate, pH 7.0-7.5. For screening purposes it is unnecessary to add complex proteolysis inhibitor cocktails. The presence of EDTA (1 mM) to inhibit calcium-activated proteases and of PMSF or benzamidine (0.1 mM) to inhibit serine proteases is sufficient. Mg2⁺⁺ (2 mM) is added. The membranes are prelabelled with a radioligand in the presence and absence of a suitable unlabelled ligand to determine the total and non-specific binding. Non-specific binding is subtracted from total binding to obtain the specific binding. A high enough concentration of labeled ligand to saturate the binding site (10×Kd) is used, so that the binding capacity is measured. The unlabelled ligand is used at a concentration of 1000×Kd. The normal criteria for specific binding must be fulfilled. The incubation is sufficient to reach equilibrium. Prelabelled membrane suspension (0.5 ml) is added to a series of centrifuge tubes a 4° C. An equal volume of detergent solution in the same buffer is added to obtain a series of different final detergent concentrations, e.g., 0, 0.1, 0.2, 0.5, 1.0, 2.0% w/v.

[1122] The tubes are mixed and incubated for 60 min. at 4° C. Solubilization is assisted by stirring or mixing, e.g., with a rotating-wheel end-over-end mixer. The tubes are centrifuged for 30-60 min at 100,000×g for 60 min. For screening, a lower speed spin, e.g., 10,000×g for 5 min (such as in a microfuge) is acceptable. Supernatant, 0.2 ml, is applied to a 2 ml column of Sephadex G50 equilibrated with the selected detergent at 0.1%. When the sample has run in, 2×0.2 ml of detergent-buffer is applied and then the void volume fraction is eluted with 0.5 ml of detergent buffer. This procedure is carried out, the remaining material is removed, and 10 ml of aqueous scintillation cocktail is added and the radioactivity counted. Sephadex G50 is substituted for G50F for hydrophilic ligands, which do not partition into detergent micelles. This gives a more rapid separation. The recovery of specifically bound ligand is calculated in absolute terms: bound ligand=(dpm (total)−dpm (non-spec.)×5/(2220×spec. act) pmol/ml. An aliquot of the pellets is resuspended and counted to calculate recovery of unsolubilized receptors. The concentration of protein in the solubilized supernatant is measured, for example, by measuring UV absorbance at 280 nm against a detergent-buffer blank. (If necessary, the supernatant is diluted to get the absorbance on scale.) Protein concentration in the solution is approximately equal to the absorbance at 280 nm.

[1123] Alternatively, the Lowry method is used. The above steps are repeated without first prelabeling the receptors in the membrane. Instead, the solubilized supernatant is incubated in the absence and presence of labeled ligand. Again, concentration of the labeled ligand is used that saturates the binding sites. Incubation is carried out for 2 h at 4° C., and the binding is assayed by gel filtration as above. The pellet is resuspended and assayed for residual binding to check overall recovery. The molecular size of the receptors in solubilized preparations is estimated by a combination of gel filtration chromatography and sucrose density gradient centrifugation in H2O and D2O. Affinity chromatography is the principal method use for purification of all of the receptors, combined with gel permeation HPLC, and ion exchange. SDS PAGE is carried out on the final product. Affinity chromatography is carried out using immobilized SEB, and the column is eluted with acid buffer or different concentrations and ionic strengths of eluting buffer.

[1124] Determination of Amino-acid and Oligonucleotide Sequences of SAg Receptors

[1125] Receptor material is eluted from the SDS-PAGE, and the N-terminal amino acid sequence is determined. When free amino termini are not available, the purified receptor material must be subjected to partial hydrolysis. The specific cleavage of peptide bonds is performed with endoproteases, such as V8 protease or trypsin, or with chemicals such as cyanogen bromide(CNBR). The resulting peptides are separated by SDS-PAGE when they are over residues or by reverse phase HPLC. The peptides thus analyzed are subjected to amino-acid sequence analysis with a gas phase or solid phase sequencer.

[1126] Antibodies are raised against the peptides. and the resultant antibodies used to confirm that the peptide is a part of the receptor by immunoprecipitation or Western blot.

[1127] To determine the full sequence of the receptor gene, oligodeoxynucleotide probes synthesized on the basis of peptide sequences are used to screen an appropriate cDNA library. Either a mixture of relatively short oligonucleotides with all possible sequences or a relatively short oligonucleotides with a sequence based on codon usage frequency is used. Genomic libraries as well as cDNA libraries are screened to obtain genes for receptors and to deduce their amino acid sequence. The amino acid sequence deduced from the nucleotide sequence is compared to the known sequences of other receptors. Among the useful structural information derived from the sequence analysis is the hydropathy profile. The presence of hydrophobic domains with a length of approximately 20 amino acids residues suggests that the regions are transmembrane segments. Genomic or cDNA clones ligated into expression vectors are used to transform suitable cell lines.

[1128] Alternatively, mRNA transcribed from these clones is injected into recipient cells such as Xenopus oocytes. The expression of receptors in these cells is confirmed by measuring ligand binding, reactivity of cell homogenates or membrane preparations with antibodies or the responses induced by receptor agonists in recipient cells. The direct function of the receptors is elucidated by reconstituting purified receptors in phospholipid vesicles with or without other components.

[1129] An additional method is based on the isolation of cDNA or genomic clones for receptors without using purified receptors. The structure of receptors and cellular responses to them is examined using these clones. Substantial amounts of receptor material is produced from these clones. Monoclonal antibodies to the SAg receptors are used to screen clones for receptors derived from cDNA libraries constructed with expression vectors.

[1130] Transfection of SAg receptor involves the ligation of the receptor gene into an appropriate expression vector, transformation of a suitable bacterial host, and isolation of an individual bacterial colony containing the plasmid vector. The plasmid DNA is harvested from the lysed bacteria. The preferred method of purification of plasmid DNA for use in transfections involves Triton-lysozyme equilibrium gradient. The cells to be used in transfection are maintained in the log phase of growth at all times. The calcium phosphate method is useful and efficient means for introduction of cloned genes in plasmid vectors into mammalian cells as described earlier in this document is preferred. However, the other methods given are useful as well. A partial list of plasmid vectors and promoters suitable for transfection of cultured mammalian cell is given in Fraser, C. M., Expression of Receptor Genes in Cultured Cells in Receptor Biochemistry, A Practical Approach, Hulme, E. C., ed., Oxford University Press, pp. 263-275, 1993.

### EXAMPLE 13

[1131] Avoiding Interference with SAg-Specific Antibodies

[1132] Naturally antibodies are found in mammals that are specific for the SAg molecule (e.g., a Staph enterotoxin). Such antibodies bind and interfere with the SAg expressed and secreted by transfected cells. Such antibodies also hinder therapeutic action of SAg infused directly (as native protein, peptide or fusion protein).

[1133] It is desirable to neutralize or otherwise remove such before the cells of this invention are administered to a subject. One way to achieve this is to pre-treat the subject with antiidiotypic antibodies specific for the variable region of SAg-specific antibodies. Another way is to infuse SAg peptides that represent the major immunogenic portions of the overall protein. Alternatively, SAg is immobilized to a solid support by covalent bonding and the blood or plasma is perfused extracorporeally through a device containing the immobilized protein, thereby removing the antibodies by immunoadsorption. In another approach, SAg-expressing cells (prokaryotic or eukaryotic) preferably of host origin, or phage displays, are encapsulated and used as immunoadsorbents to binds circulating SAg-specific antibodies. An organoid containing these adsorbing cells is positioned subcutaneously or placed into the circulation via catheter and then removed once the adsorption process is complete. Alginate encapsulated cells expressing SAg are preferred but other known modes of cell encapsulation may be used. Liposomes with surface-bound SAg are another form of immunoabsorbent that are employed either as an organoid or by direct injection.

[1134] Induction of Immunological Tolerance

[1135] The induction of tolerance to epitopes of the SAg molecule which induce a humoral antibody response would be desirable. The portion of the SEA molecule which binds to natural antibodies is the linear sequence of residues 232-262. Immune tolerance is induced using this sequence by the method of Dintzis et al., Proc. Natl. Acad. Sci. 89: 1113-1117 (1992). in which low molecular weight peptide arrays are administered to patients with circulating antibodies to enterotoxins. The peptides are delivered parenterally or orally once weekly in doses of 1-500 mg/kg for three to six weeks after which there is a reduction and disappearance of circulating antibody specific for the tolerogen. After one or more of the foregoing treatments, native SAg or SAg conjugated to a monoclonal tumor-specific antibody and administered to the host can now localize to tumor sites without diversion by circulating SAg-specific antibodies.

[1136] Phage Displayed SAgs

[1137] Phage display technology may also be used neutralize circulating anti-enterotoxin antibodies. The SAg and/or SAg receptor is expressed at the surface of bacteriophage as a fusion protein with the gene VIII protein (gVIIIp). This phage-displayed SAg fusion protein retains the properties of the natural protein. For this invention, the filamentous phage vector f88-4 which forms a fusion protein between the C terminus of the inserted gene product and the N terminus of gVIIIp is used. The phage expressing SEA is injected intravenously into patients that have natural antibodies to SEA. The amount of phage (transducing units) required to neutralize the circulating pool of antibodies is predetermined by antigen binding inhibition assay. The number of transducing units required to neutralize the pool of circulating SEA specific antibodies is administered intravenously. Shortly after this injection, the host is ready for treatment with active SEA which is no longer hindered from finding its “target,” i.e., enterotoxin receptors expressed by tumor cells or T cells.

[1138] SEA clone pKH-X35 is employed. PCR with Vent Polymerase 9NEB is used to mutate the 5′- and 3′-ends of the SEA gene for cloning into f88-4. The construct is as follows. The 5′ oligonucleotide used is (SEQ ID NO:145) 5′-CTCCAAGCTTTGVCCAGCGAGAAAAGCGAAG-3′. Two 3′ oligonucleotide primers are used. For the construct with the five amino acid linker between SEA and gVIIIp (SEA L), the primer (SEQ ID NO:146) 5′-GCCTCCTGCAGATCCACCGCCTCCGGATGT-ATATAAATATATATC-3′ and for the non-linker version (SEA-P); (SEQ ID NO:147) 5′-GCCTCCTGCAGATGTATATAAATATATATC-3′ are used. The two SEA PCR products are cut with HindIlI and PstI and cloned into f88-4. They are transformed by electroporation into E. coli strain DH5a and sequenced. Phage are produced by growing the transformed bacteria overnight in 0.5 L of broth with 20 mg/ml tetracycline. The culture is pelleted twice (800×g for 15 min) and the phage precipitated out of the cleared supernatant by the addition of 0.15 vols. of PEG/NaCl solution (17% PEG 8000, 19% NaCl in water). After incubation at 4° C. for 2 hours, the phage are resuspended in TBS and sterile-filtered through a 0.22-m membrane. Phage are selected by the micropanning technique and by cell binding. Binding to antibody is assessed by attaching mAb to the surface of 96-well ELISA plates, blocking with 1% BSA, incubating with 100 mg/ml of SEA or PBS as a control and then incubating with the various phage preparations for >2 hours at 4° C. The phage is then eluted with 0.1 M HCl pH 2 ( adjusted with glycine) for 10 minutes, neutralized and used to infect starved E. coli MC10161 F′ Kan. The infected bacteria are then spread on tetracycline (20 mg/ml) LB agar plates. After overnight culture tetracycline resistant colonies are counted representing the number of transducing units (TU) recovered. To determine the number of SEA-bearing phage among the tetracycline-resistant colonies, colony blotting is performed by standard techniques probing with a ³²P-labeled SEA probe. An antibody based variant of this technique is involves probing with a rabbit anti-SEA serum as for Western blots.

[1139] Chimeric Enterotoxins

[1140] Likewise, hybrid or chimeric SAgs that are non-immunogenic are used to stimulate cells. When these molecules are injected into hosts that have natural antibodies, they are not rapidly eliminated from the circulation. Such chimeric molecules lacking the binding site for natural antibodies preserve the T cell mitogenic and cytokine-inducing properties of the native SAg. A peptide sequence from another SAg to which antibodies do not exist is substituted using genetic or biochemical methods well known in the art. This is particularly useful in the case of enterotoxins such as SEB or SEA to which a large percentage of humans have naturally occurring circulating antibodies. The antibody binding region of these molecules near the C terminal regions is delineated. The substitution of the antibody binding sequences in SEA or SEB for sequences from SEE or SED to which a very small number of humans have circulating antibodies markedly enhances the tumor killing efficacy of the injected chimeric enterotoxins.

[1141] A hybrid molecule consisting of a 26 amino acid peptide corresponding to the N-terminal portion of SEA, the loop structure of SEA, a conserved mid-molecular sequence of SEA and SEB, and a C terminal sequence of SEB was synthesized in collaboration with Multi-Peptide Systems, La Jolla, Calif. Peptides were prepared using a variation of Merrifield's original solid phase procedure in conjunction with simultaneous multiple peptide synthesis using t-Boc chemistries. Peptides were cleaved from the resins using simultaneous liquid HF cleavage. The cleared peptides were then extracted with acetic acid and ethyl ether and lyophilized. Reverse phase HPLC analysis and mass spectral analysis revealed a single major peak with the molecular weight corresponding closely to theoretical.

[1142] Synthetic SAgs

[1143] Amino acid sequences of SEA and SEB known to be involved in the interaction with the TCR and MHC class II molecules are retained. The loop structure of SEA is retained because it is devoid of histidine moieties that are associated with the emetic response. Residues 1-10 of the N-terminal region of SEA are retained because they have MHC class II binding activity. The loop structure of SEA is retained because it and associated disulfide linkages are considered to be important for T lymphocyte mitogenicity, stabilization of the molecule, and resistance to in vivo degradation. A conserved sequence in the central portion of SEA and SEB adjacent to the disulfide loop (amino acids 107-114) was retained. Histidine moieties are deleted from the molecule because of their association with the emetic response.

[1144] Synthesis Procedure

[1145] The preparation of all peptides was carried out using a variation of Merrifield's original solid phase procedures in conjunction with the method of Simultaneous Multiple Peptide Synthesis using t-Boc chemistries (Merrifield R B I, J. Amer. Chem. Soc. 85:2149-2154 (1963)); Houghten R A, Proc. Natl. Acad. Sci. USA 82:5131-5135 (1985); and Houghten R A et al., J. Peptide Protein Res. 27:673-678 (1985)).4-methylbenzhydrylamine (mBHA) and phenylacetamidomethyl (PAM) resins were purchased from Advanced Chemtech (Louisville, Ky.) and Bachem (Torrance, Calif.), respectively. All of the amino acids contained the t-butyloxycarbonyl (t-Boc)-amino protecting group and were purchased from Bachem. The side chain protecting groups included benzyl (threonine, serine and glutamic acid), chlorobenzyloxycarbonyl(lysine), bromobenzyloxycarbonyl(tyrosine), cyclohexyl(aspartic acid), p-toluene sulfonyl(arginine), formyl(tryptophan), methyl benzyl(cysteine), and dinitrophenyl or benzyloxycarbonyl(histidine). Cysteine with the HF stable acetamidomethyl (ACM) protecting group was used, upon request, for internal cysteines. Each lot of amino acid derivative was tested by melting point analysis. Reagent grade methylene chloride (CH2Cl2), isopropanol (IPA), and dimethylformamide (DMF) were obtained from Fisher Scientific (Tustin, Calif.). diisopropylcarbododimide (DIPCDI) and diisopropylethylamine (DIEA) were purchased from Chem Impex (Wood Dale, Ill.). Trifluoroacetic acid was purchased from Halocarbon (Hackensack, N.J.).

[1146] The appropriate resin, mBHA for C-terminal amides and PAM for C-terminal acids, was weighed with a Mettler AE 240 balance (Highstown, N.J.) into separate polypropylene mesh (74 mm) packets which had been pre-sealed on 3 of 4 sides using a TSW TISH-300 Impulse Sealer (San Diego Bag and Supply; San Diego, Calif.). Each packet was also pre-labeled with a reference code using a KOH I NOOR Rapidograph pen with graphite based ink to allow them to be easily identified during resin addition and during the synthesis process. Each packet was then carefully sealed completely to make sure there would be no resin leakage. All the resin containing packets (up to 150) were then placed in a common Nalgene bottle. Enough CH2Cl2 to cover all the packets was then added to the bottle, which was then capped and vigorously shaken for 30 seconds on an Eberbach Shaker (Fisher Scientific; Tustin, Calif.) to wash and swell the resin. The CH2Cl2 solution was then removed. All subsequent steps involved the addition of enough solvent to cover all the packets and vigorous shaking to ensure adequate solvent transfer. The N-t-Boc was removed by acidolysis using a solution of 55% TFA in CH2Cl2 for 30 minutes, leaving the TFA salt of the a-amino group. The TFA wash solution was then removed.

[1147] The packets were then washed for 1 min with CH2Cl2 (2×), IPA (2×) and CH2Cl2 (2×) to squeeze out excess TFA and to prepare for neutralization. The TFA salt was neutralized by washing the packets three times with 5% DIEA in CH2Cl2 for two minutes each. This was followed by two washes with CH2Cl2 to remove excess base.

[1148] The resin packets were then removed from the common Nalgene bottle and sorted according to computer generated checklists in preparation for coupling. This was double checked to ensure the packets were added to the correct amino acid solution. The packets were then added to bottles containing the appropriate 0.2 M amino acid in CH2Cl2 and/or DMF depending on solubility. These solutions were also prepared using computer generated information. An equal volume of 0.2 M DIPCDI was then added to activate the coupling reaction. The bottles were then shaken for one hour to ensure complete coupling. At completion, the reaction solution was discarded and the packets were washed with DMF for 1 min to remove excess amino acid and the by-product, diisopropylurea. A final CH2Cl2 wash as then used to remove DMF. The packets were then removed from their individual coupling bottles and placed back into the common Nalgene bottle.

[1149] The peptides were then completed by repeating the same procedure while substituting for the appropriate amino acid at the coupling juncture. The packets were then taken through a final acidolysis along with subsequent CH₂C₁₂, IPA and CH2Cl2 washes to leave the peptides in the TFA salt form. The packets were then dried in preparation for the next process.

[1150] Final side chain deprotection and cleavage of the anchored peptide from the resin was achieved through simultaneous liquid HF cleavage (Houghten R A et al., supra.

[1151] Gaseous N2, HF, and argon were acquired from Air Products (San Diego, Calif.). Anisole was purchased from Aldrich Chemical Co. (Milwaukee, Wis.). Acetic acid (HOAc) and ethyl ether were purchased from Fisher Scientific (Tustin, Calif.). Each packet along with a Teflon coated stir bar was placed into an individual reaction vessel of a multi-vessel hydrogen fluoride apparatus (Multiple Peptide Systems; San Diego, Calif.). An amount of anisole equaling 7.5% of the expected volume of HF was then added to act as a carbonium ion scavenger. The reaction tubes were lubricated with vacuum grease at the point where each contacts the apparatus and sealed onto the HF system. The system was then purged with N2 while cooling the reaction vessels to −70° C. using an acetone/dry ice bath. HF (g) was condensed to the desired level and temperature elevated to −10° C. using ice and water. The reaction was allowed to proceed for 90 minutes with the temperature slowly rising from −10° C. to 0° C. HF was removed using a strong flow of N2 for 90 minutes followed by the use of aspirator vacuum for 60 minutes while maintaining the temperature at 0° C. The reaction vessels were then removed from the apparatus and capped. The residual anisole was removed with two ethyl ether washes. The peptide was then extracted with two 10% HOAc washes. A 50 ml sample of the crude peptide was taken and run on an analytical Beckman 338 Gradient HPLC System (Palo Alto, Calif.) using a Vydac C18 column to profile the initial purity of the compound. The crude peptide was then lyophilized twice on a Virtis Freezemobile 24 Lyophilizer, weighed and stored under argon.

[1152] Analytical RP-HPLC was used to determine the homogeneity and approximate elution conditions of the peptides produced. HPLC grade acetonitrile (ACN) was purchased from Fisher Scientific (Tustin, Calif.). HPLC grade TFA was obtained from Pierce Chemicals (Rockford, Ill.). RP-HPLC analysis was carried out on a Beckman 338 Gradient HPLC system (Palo Alto, Calif.) equipped with a BioRad AS-100 autosampler and a Shimadzu CR4A integrator. The column used for all analyses this quarter was a Vydac C-18 column (4.6×250 mm). The solvent system used was 0.05% aqueous TFA (A) and 0.05% TFA in ACN (B) with a flow rate of 1 ml/min. Absorbance was measured at 215 nm. Most peptides were analyzed using the following special gradient; 5.60% (B) in 28 minutes. Hydrophobic peptides were analyzed using the following special gradient: 5-40% (B) in 9 minutes, 40-90% (B) for 10 additional minutes, 95% (3) for the last 9 minutes.

[1153] Analytical data was reviewed. The product peak was identified and marked based upon knowledge of common impurities and the use of predicted HPLC retention times.

[1154] Peptides that did not meet normal purity requirements for crude material were purified using preparative RP-HPLC techniques. HPLC grade acetonitrile (CAN) was purchased from Fisher Scientific (Tustin, Calif.). HPLC grade TFA was obtained from Pierce Chemicals (Rockford, Ill.). Purification was carried out on a Waters Delta Prep 3000 with a Preparative Waters Prep Pak Module Radial Compression C18 column (5 cm×25 cm, 10-20 m). The solvent system used was 0.05% aqueous TFA (A) and 0.05% TFA in ACN (B). The crude peptides were solubilized in an HOAc/H20 mixture and injected onto the column with 0.25% to 0.50% ACN per minute linear gradient. The absorbance was measured at 230 nm and 40 ml fractions were collected upon elution with an ISO Fraction Collector (Lincoln, Nebr.). The preparative profile was reviewed and selected fractions were analyzed by analytical RP-HPLC. The analytical data was reviewed and fractions were combined and lyophilized. The lyophilized material was weighed, sampled for a final analytical RP-HPLC analysis and stored under argon in powder form. This process was repeated if the purity level attained was not sufficient.

[1155] Mass spectral analysis was used to determine the molecular weight of the peptides produced. 95% ethanol was purchased from Fisher Scientific (Tustin, Calif.). HPLC grade TFA was obtained from Pierce Chemicals (Rockford, Ill.). Nitrocellulose matrices (targets) were purchased from Applied Biosystems (Foster City, Calif.).

[1156] The samples were solubilized in a 1:1 solution of 95% ethanol and 0.1% TFA (aqueous). The samples were applied to a nitrocellulose matrix (Target). The mass spectra were obtained using an ABI Bio-Ion 20 Mass Spectrometer (Foster City, Calif.). The apparatus makes use of plasma desorption ionization via a Cf252 source. The ionized molecules are then analyzed via time-of flight. An accelerating voltage of 15,000 V is used to accelerate the particles.

[1157] The Protocol for Intramolecular Disulfide Bridge

[1158] Dissolve crude peptide (300-500 mg) in 200 ml of deoxygenated water and adjust the pH to 8.5 using NH4OH 28%=Solution A. Note: If the peptide is not very soluble in water, some MeOH can be added.

[1159] Dissolve 0.5 g K3Fe(CN)6 in 200 ml of deoxygenated water and adjust the pH to 8.5 using NH4OH 28%=Solution B. Note: 0.5 g K3Fe(CN)6 is an average value for 500 mg of a 10 mer peptide. The excess of K3Fe(CN)6 should be approximately 3×. It can be adjusted.

[1160] Solution A is then dropped slowly into solution B over a 2 hour period. The mixture is then allowed to react, for an additional 1 hour with stirring. The pH is then adjusted to 4.0-4.5 with 10% ACTH. This solution is injected directly into a preparative RP-HPLC. The major peak is then collected. This “pseudo dilution” technique favors the intramolecular disulfide. Therefore, the major peak is the cyclic product.

[1161] The chimeric enterotoxin molecule was tested in normal rabbits and rabbits with established VX2 carcinoma. It was administered intravenously and peripherally with adjuvant. The chimeric molecule (1 mg/ml) was diluted initially in 1 ml of sterile H2O. When the solution was clear, 9 ml of normal saline was added. The solution was filtered through a 0.45 m filter and stored in 0.5-1 ml aliquots. Dosage ranged from 2.6-5.0 mg/kg and was described over 3 minutes via the lateral ear vein in a volume of 0.05 ml diluted further in 1.0 ml of 0.15 M NaCl:

[1162] The i.v. line was then washed with 3 ml of 0.15M NaCl.

[1163] In two animals, the temperature rose only 0.3 F over the ensuing 24 hours and there was no discernible toxicity over the ensuing 14 days of observation. One animal was described a second dose of the chimeric molecule in pluronic acid triblock adjuvant. This was described in a dose of 8.5 mg subcutaneously in each thigh with a total dose 5 mg/kg. The pluronic acid triblock preparation was prepared as follows: 4.23 cc PBS; 0.017 cc Tween; 0.05 cc Squalene; and 0.25 cc Pluronic. The PBS and Tween were mixed first then squalene was added followed by pluronic acid. The total mixture was vortexed for 3-4 minutes. Two ml of above plus 0.34 ml of the chimeric protein (34 mg) plus 1.66 cc PBS were added to the mixture. The mixture was vortexed vigorously for 1-2 minutes. One ml was injected into each thigh (total vol. injected was 0.17 ml or 17 mg protein or 5 mg/kg).

[1164] For nearly 5 weeks after injection, no adverse effects were noted. The tumor showed slow, but progressive growth over this period of time. To date, the chimeric enterotoxin molecule appears to be safe in animals and no untoward side effects were demonstrated. The adjuvant used for these studies was the pluronic acid triblock copolymer which has been used to boost the immune response to various antigens in animal models and which is under testing at this point in humans with hepatitis and herpes simplex infections. Other adjuvants including those prepared in water and oil emulsion and aluminum hydroxide to administer various SAgs in vivo to tumor bearing rabbits were also used.

[1165] Additionally, enterotoxins such as SEE, SED, SEC, and TSST-1 are used to prepare hybrid molecules containing amino acid sequences and homologous to the enterotoxin family of molecules. To this extent, mammary tumor virus sequences, heat shock proteins, stress peptides, Mycoplasma and mycobacterial antigens, and minor lymphocyte stimulating loci bearing tumoricidal structural homology to the enterotoxin family are useful as anti-tumor agents. Hybrid enterotoxins and other sequences homologous to the native enterotoxins are immobilized or polymerized genetically or biochemically to produce the repeating units and stoichiometry required for (a) binding of accessory cells to T lymphocytes and (b) activation of T lymphocytes.

### EXAMPLE 14

[1166] Pharmaceutical Compositions and Their Manufacture

[1167] The pharmaceutical compositions may be in the form of a lyophilized particulate material, a sterile or aseptically produced solution, a tablet, an ampoule, etc. Vehicles such as water (preferably buffered to a physiological pH such as PBS or other inert solid or liquid material may be present. In general, the compositions are prepared by being mixed with or dissolved in, bound to or otherwise combined with one of more water-insoluble or water-soluble aqueous or non aqueous vehicles, if necessary together with suitable additives and adjuvants. It is imperative that the vehicles and conditions shall not adversely affect the activity of the conjugate. Water as such is comprised within the expression vehicles.

[1168] A suitable therapeutic composition is used in the treatment of cancer of any kind including but not limited to carcinomas, sarcomas, lymphomas, leukemias and comprises a combination of:

[1169] (1) a recombinant DNA molecule encoding SAg in combination with, preferably fused with, another recombinant DNA sequence encoding another protein;

[1170] (2) a recombinant DNA molecule encoding SAg-in combination with another peptide or polypeptide; or

[1171] (3) a recombinant DNA molecule encoding a protein other than a SAg in combination with a SAg peptide or polypeptide.

[1172] These compositions that may comprise more than one components are administered together or sequentially and they may be combined (separately or together) with a delivery vehicle, preferably liposomes as disclosed herein.

[1173] Upon entering its intended or targeted cells, the therapeutic composition leads to the production of SAg and a second protein that may result in (a) apoptosis of the cancer cell and (b) with or without such apoptosis, the activation of effector cells of the immune system, including any or all of the following: cytotoxic T cells, NKT cells, NK cells, T helper cells and macrophages. The present therapeutic compositions are useful for the treatment of cancers, both primary tumors and tumor metastases.

[1174] Use of the present therapeutic composition overcomes the disadvantages of traditional treatments for metastatic cancer. For example. compositions of the present invention can target dispersed metastatic cancer cells that cannot be treated using surgery. In addition, administration of such compositions is not accompanied by the harmful side effects of conventional chemotherapy and radiotherapy.

[1175] A therapeutic composition also comprises a pharmaceutically acceptable carrier defined as any substance suitable as a vehicle for delivering a nucleic acid molecule (alone or in some combination with a protein) to a suitable in vivo or in vitro site. Preferred carriers are capable of maintaining DNA in a form that is capable of entering the target cell and being expressed by the cell.

[1176] Preferred carriers include: (1) those that transport, but do not specifically target a nucleic acid molecule to a cell (referred to herein as “non-targeting carriers”); and (2) those that deliver a nucleic acid molecule to a specific site in an animal or a specific cell (“targeting carriers”). Examples of non-targeting carriers are water, phosphate buffered saline (PBS), Ringer's solution, dextrose solution, serum-containing solutions, Hank's balanced salt solution, other aqueous, physiologically balanced solutions, oils, esters and glycols. Aqueous carriers can contain suitable additional substances which enhance chemical stability and isotonicity, such as sodium acetate, sodium chloride, sodium lactate, potassium chloride, calcium chloride, and other substances used to produce phosphate buffer, Tris buffer, and bicarbonate buffer and preservatives, such as thimerosal, m- and o-cresol, formalin and benzyl alcohol.

[1177] Preferred substances for aerosol delivery include surfactant substances such as esters or partial esters of fatty acids containing from about 6-22 carbon atoms. Examples are esters of caproic, octanoic. lauric, palmitic, stearic, linoleic, linolenic, olesteric, and oleic acids.

[1178] Other carriers can include metal particles (e.g., colloidal gold particles) for use with, for example, a biolistic gun through the skin.

[1179] Therapeutic compositions of the present invention can be sterilized by conventional methods and may be lyophilized.

[1180] The compositions of the present invention are delivered using a delivery vehicle that can be modified to target a particular site in a subject. Suitable targeting agents include ligands capable of selectively (i.e., specifically) binding to another molecule at a particular site. Examples are antibodies, antigens, receptors and receptor ligands. For example, an antibody specific for an antigen on the surface of a cancer cell can be placed on the outer surface of a liposome delivery vehicle to target the liposome to the cancer cell. By manipulating the chemical formulation of the lipid portion of a liposome preparation, it is possible to modulate its extracellular or intracellular targeting. For example, the charge of the lipid bilayer of a liposome surface can be varied chemically to promote fusion with cells having particular charge characteristics. Preferred liposomes comprise a compound that targets the liposome to a tumor cell, such as a ligand on the outer surface of the liposome that binds a molecule on the tumor cell surface.

[1181] Although the DNA constructs of the present invention can be administered in naked form, a liposome is a preferred vehicle for delivery in vivo. A liposome can remain stable in an animal for a sufficient amount of time, at least about 30 minutes, more preferably for at least about 1 hour and even more preferably for at least about 24 hours, to deliver a nucleic acid molecule to a desired site.

[1182] A liposome of the present invention comprises a lipid composition that can fuse with the plasma membrane of the targeted cell to deliver the encapsulated nucleic acid molecule into a cell. Preferably, the liposomes' transfection efficiency is about 0.5 mg DNA per 16 nmol of liposome delivered to about 10⁶ cells, more preferably about 1.0 mg DNA per 16 nmol of liposome delivered to about 10⁶ cells, and even more preferably about 2.0 mg DNA per 16 nmol of liposome delivered to about 10⁶ cells.

[1183] For use in the present invention, any liposome that is used in art-recognized gene delivery methods is appropriate. Preferred liposomes have a polycationic lipid composition and/or a cholesterol backbone conjugated to polyethylene glycol.

[1184] Complexing a liposome with nucleic acids for uses described herein is achieved using conventional methods. A suitable concentration of DNA to be added to a liposome preparation a concentration that is effective for delivering a sufficient amount of DNA molecules to a cell so that the cell can produce sufficient SAg and/or a other transduced protein to induce tumoricidal activity or to stimulate or regulate effector cells in a desired manner. Preferably, between about 0.1 mg and 10 mg of DNA is combined with about 8 nmol liposomes; more preferably, between about 0.5 mg and 5 mg of DNA is used even more preferably, about 1.0 mg of DNA is combined with about 8 nmol liposomes.

[1185] Another preferred delivery system is the sickled erythrocyte containing the nucleic acids of choice a given in Example 6. The sickled erythorcytes undergo ABO and RH phenotyping to select compatible cells for delivery. The cells are delivered intravenously or intrarterially in a blood vessel perfusing a specific tumor site or organ e.g. carotid artery, portal vein, femoral artery etc. over the same amount of time required for the infusion of a conventional blood transfusion. The quantity of cells to be administered in any one treatment would range from one tenth to one half of a full unit of blood. The treatments are generally given every three days for a total of twelve treaments. However, the treatment schedule is flexible and may be given for a longer of shorter duration depending upon the patients response.

[1186] Another preferred delivery vehicle is a recombinant virus particle, for example, in the form of a vaccine. A recombinant virus vaccine of the present invention includes the DNA encoding the therapeutic composition packaged in a viral coat that allows entrance of the transducing DNA into a cell and its expression. A number of recombinant virus particles can be used, for example, alphaviruses, poxviruses, adenoviruses, herpesviruses, arena virus and retroviruses.

[1187] Also useful as a delivery vehicle is a “recombinant cell vaccine,” preferably tumor vaccines, in which allogeneic (though histocompatible) or autologous tumor cells are transfected with a DNA preparation encoding the therapeutic proteins or peptides to be expressed. The cells are preferably irradiated and then administered to a patient by any of a number of known injection routes.

[1188] The therapeutic compositions that are administered by “tumor cell vaccine,” includes the recombinant molecules without carrier. Treatment with tumor cell vaccines is useful for primary or localized tumors as well as metastases. When used to treat metastatic cancer, which includes prevention of further metastatic disease, as well as, the cure existing metastatic disease.

[1189] As used herein, the term “treating” a disease includes alleviating the disease or any of its symptoms and/or preventing the development of a secondary disease resulting from the occurrence of the initial disease.

[1190] An “effective treatment protocol” includes a suitable and effective dose of an agent being administered to a subject, given by a suitable route and mode of administration to achieve its intended effect in treating a disease.

[1191] Effective doses and modes of administration for a given disease can be determined by conventional methods and include, for example, determining survival rates, side effects (i.e., toxicity) and qualitative or quantitative, objective or subjective, evaluation of disease progression or regression. In particular, the effectiveness of a dose regimen and mode of administration of a therapeutic composition of the present invention to treat cancer can be determined by assessing response rates. A “response rate” is defined as the percentage of treated subjects that responds with either partial or complete remission. Remission can be determined by, for example, measuring tumor size or by microscopic examination of a tissue sample for the presence of cancer cells.

[1192] In the treatment of cancer, a suitable single dose can vary depending upon the specific type of cancer and whether the cancer is a primary tumor or a metastatic form. One of skill in the art can test doses of a therapeutic composition suitable for direct injection to determine appropriate single doses for systemic administration, taking into account the usual subject parameters such as size and weight. An effective anti-tumor single dose of a therapeutic recombinant DNA molecule or combination thereof is an amount sufficient amount to result in reduction, and preferably elimination, of the tumor after the DNA molecule or combination has transfected cells at or near the tumor site.

[1193] A preferred single dose of SAg-encoding DNA molecule or fusion product thereof is an amount that, when transfected into a target cell population, leads to the production of SAg in an amount, per transfected cell, ranging from about 250 femtograms (fg) to about 1 mg, preferably from about 500 fg to about 500 pg and more preferably from about 1 pg to about 100 pg.

[1194] When the SAg-encoding DNA is combined with a second DNA molecule encoding a second protein product, an effective single dose of a the second DNA molecule is an amount that when transfected into a target cell population leads to the production of the second protein product in an amount, per transfected cell, ranging from about 10 fg to about 1 ng, more preferably from about 100 fg to about 750 pg.

[1195] An effective cancer-treating single dose of SAg-encoding DNA and a second DNA molecule encoding a second protein when administered to a subject using a non-targeting carrier, is an amount capable of reducing, and preferably eliminating, the primary or metastatic tumor following transfection by the recombinant molecules of cells at or near the tumor site. A preferred single dose of such a therapeutic composition is from about 100 mg to about 4 mg of total recombinant DNA, more preferably from about 200 mg to about 2 mg, most preferably from about 200 mg to about 800 mg of total recombinant molecules.

[1196] A preferred single dose of liposome-complexed, SAg-encoding DNA, is from about 100 mg of total DNA per 800 nmol of liposome to about 4 mg of total DNA molecules per 32 mmol of liposome, more preferably from about 200 mg per 1.6 mmol of liposome to about 3 mg of total recombinant DNA per 24 mmol of liposome, and even more preferably from about 400 mg per 3.2 mmol of liposome to about 2 mg per 16 mmol of liposome.

[1197] One of skill in the art recognizes that the number of doses required depends upon the extent of disease and the response of an individual to treatment. Thus, according to this invention, an effective number of doses includes any number required to cause regression of primary or metastatic disease. A preferred treatment protocol comprises monthly administrations of single doses (as described above) for up to about 1 year. An effective number of doses (per individual) of a SAg-encoding DNA molecule and a second DNA molecule encoding a second protein, when administered in a non-targeting carrier or when complexed with liposomes, is from about 1 to about 10 dosings, preferably from about 2 to about 8 dosings, and even more preferably from about 3 to about 5 dosings. Preferably, such dosings are administered about once every 2 weeks until signs of remission appear, followed by about once a month until the disease is gone.

[1198] The therapeutic compositions can be administered by any of a variety of modes and routes, including but not limited to, local administration into a site in the subject animal, which site contains abnormal cells to be destroyed. An example is the local injection within the area of a tumor or a lesion. Another example is systemic administration.

[1199] Therapeutic compositions that are best delivered by local administration include recombinant DNA molecules

[1200] (a) in a non-targeting carrier (e.g., “naked” DNA molecules as taught in Wolff K et al., 1990, Science 247, 1465-1468); and

[1201] (b) complexed to a delivery vehicle.

[1202] Suitable delivery vehicles for local administration include liposomes, and may further comprise ligands that target the vehicle to a particular site.

[1203] A preferred mode of local administration is by direct injection. Direct injection techniques are particularly useful for injecting the composition into a cellular or tissue mass such as a tumor mass or a granuloma mass that has been induced by a pathogen. Thus, the present recombinant DNA molecule complexed with a delivery vehicle is preferably injected directly into, or locally in the area of, a tumor mass or a single cancer cell.

[1204] The present composition may also be administered in or around a surgical wound. For example, a patient undergoes surgery to remove a tumor. Upon removal of the tumor, the therapeutic composition is coated on the surface of tissue inside the wound or injected into areas of tissue inside the wound. Such local administration will treat cancer cells that were not successfully removed by the surgical procedure, as well as prevent recurrence of the primary tumor or development of a secondary tumor in the surgical area.

[1205] Therapeutic compositions that are best delivered by systemic administration include recombinant DNA molecules complexed to a tumor binding ligand or a ligand that binds to the tumor vasculature or stroma. Examples are antibodies, antigens, receptor, receptor ligand or a targeted delivery vehicle as disclosed herein. These delivery vehicles may be liposomes into which are incorporated targeting ligands, preferably ligands that targeting the vehicle to the site of tumor cells or another type of lesion. For cancer treatment, ligands that selectively bind to cancer cells, or to cells within the area of a cancer cell, are preferred. Systemic administration is used to treat primary or localized tumors and, in particular, tumor metastases wherein the cancer cells are dispersed. Systemic administration is advantageous when targeting cancer in organs, especially those difficult to reach for direct injection, (e.g., heart, spleen, lung or liver).

[1206] Preferred modes and routes of systemic administration include intravenous injection and aerosol, oral and percutaneous (topical) delivery. Intravenous injection methods and aerosol delivery are performed conventionally. Oral delivery is achieved preferably by complexing the therapeutic composition to a carrier capable of withstanding degradation by digestive enzymes in the subject's digestive system. Examples of such carriers, includes plastic capsules or tablets as are known in the art. For topical delivery, the therapeutic composition is mixed with a lipophilic reagent (e.g., DMSO) that can pass into the skin.

[1207] The therapeutic compositions and methods of the present invention are intended for animals, preferably mammals and birds, in particular house pets, farm animals and zoo animals as these terms are generally understood. By “farm animals” are intended animals that are eaten or those that produce useful products (e.g., wool-producing sheep). Examples of preferred animal subjects to be treated are dogs, cats, sheep, cattle, horses and pigs. The present compositions and methods are effective in inbred and outbred animal species. Most preferably, the animal is a human.

[1208] Another component useful in combination with the therapeutic nucleic acids of this invention is an adjuvant suited for use with a nucleic acid-based vaccine. Examples of adjuvant-containing compositions include

[1209] 1) SAg-encoding DNA and a second DNA encoding a recombinant protein; or

[1210] 2) SAg-encoding DNA combined with another peptide or polypeptide; or

[1211] 3) DNA encoding a second recombinant protein and a SAg peptide or polypeptide.

[1212] As indicated above, effective doses of a SAg-encoding DNA combined with a second DNA molecule, or a vaccine nucleic acid molecule are determined conventionally by those skilled in the art. One measure of an effective dose is that produces a sufficient amount of SAg and second protein to stimulate effector cell immunity in a manner that enhances the effectiveness of the vaccine. Adjuvants of the present invention are particularly suited for use in humans because many traditional adjuvants (e.g., Freund's adjuvant and other bacterial cell wall components) are toxic whereas others are relatively ineffective (e.g., aluminum-based salts and calcium-based salts).

### EXAMPLE 15

[1213] General Procedures for In Vivo and Ex Vivo Sensitization to Produce Tumor Specific Effector Cells for Adoptive Immunotherapy

[1214] Tumor growth is initiated by subcutaneous inoculation of mice on both flanks with 1.5×10⁶ tumor cells suspended in 0.05 ml of HBSS. After 9-12 days of tumor growth (approximately 8 mm in diameter), tumor-draining inguinal LN are removed sterilely. Lymphocyte suspensions are prepared by teasing LN with needles followed by pressing with the blunt end of a 10-ml plastic syringe in HBSS. Tumor draining LN cells are stimulated in vitro in a two-step procedure. Briefly, 4×10⁶ LN cells in 2 ml of complete medium (CM) containing the SAg constructs are incubated in a well of 24-well plates at 37° C. in a 5% CO2 atmosphere for 2 days. CM consisted of RPMI 1640 medium supplemented with 10% heat-inactivated FCS, 0.1 mM nonessential amino acids, 1 mM sodium pyruvate, 2 mM freshly prepared L-glutamine. 100 mg/ml streptomycin, 100 U/ml penicillin, a 50 mg/ml gentamycin, 0.55 mg/ml fungizone (all from GIBCO, Grand Island, N.Y.) and 5×10⁻⁵ M 2-mercaptoethanol (Sigma). The cells were harvested, then washed and further cultured a 3×10⁵/well in 2 ml of CM with IL-2. After 3-day incubation in IL-2, the cells are collected and counted to determine the degree of proliferation. Finally, the cells are suspended in appropriate media for flow cytometric analysis, evaluation of cytotoxicity and lymphokine secretion, or for adoptive immunotherapy.

### EXAMPLE 16

[1215] General Adoptive Immunotherapy Protocol

[1216] Mice are injected with 2 to 3×10⁵ syngeneic tumor cells suspended in 1 ml of HBSS to initiate pulmonary metastases. On day 3, activated cells are given i.v. at numbers indicated generally 10⁶-10⁷. In some instances, mice are also treated with 15,000 U IL2 in 0.5 ml HBSS twice daily for 4 consecutive days to promote the in vivo function and survival of the activated cells. On day 20 or 21, all mice are randomized, killed and metastatic tumor nodules on the surface of the lungs enumerated as previously described. If pulmonary metastases exceeded 250, this number is arbitrarily assigned for statistical analysis. The significance of differences in metastases numbers between experimental group is determined by the Wilcoxon rank sum test. Two sided p values of <0.1 are considered significant. Each experimental group consists of at least five mice and no animal was excluded from the statistical evaluation.

[1217] For testing SAg-glycosylceramide complexes and SAg lipopolysaccharide complexes, additional models are used to assess the dependence of the antitumor effect on NKT cells. Natural killer T cells (NKT) lymphocytes express an invariant TCR encoded by the V14 and Ja281 gene segments. Mice with a deletion of Ja281 exclusively lack V14. The V14 NKT cell-deficient mice no longer mediate IL-12 induced rejection of tumors. Also generated are transgenic mice lacking recombination activating gene(RAG) which preferentially generate V14 NKT cells but block the development of other lymphocyte lineages, including NK, B, and T cells. These mice are termed V14 NKT mice. J281+/+(wild type), J281−/−(deleted of V14) and RAG−/−V14tgV8.2tg (deleted of NK, T and B cells but preferentially generate V14 NKT cells) mice are injected

[1218] (a) with 2×10⁶ B16 or FBL-3 (erythroleukemia) cells in the spleen to induce liver metastasis,

[1219] (b) intravenously with 3×10⁵ B16 or 2×10⁶ LLC (Lewis lung carcinoma) cells for pulmonary metastases or

[1220] \mathring{c} subcutaneously with 2×10⁶ B16 cells (melanoma) for subcutaneous tumor growth on day 0.

[1221] SAg conjugates or fusion proteins are injected in doses of 0.1 to 50 mg on days 3, 5 , 7, and 9 after the day of tumor implantation. Control animals are injected with PBS on the same schedule. On day 14, the mice are killed and either metastatic nodules counted or GM3 melanoma antigens measured by radioimmunoassay as previously described. For subcutaneous tumor growth, injection of IL-12 or PBS is initiated on day 5, and the mice are treated five times per week. The diameters of tumors are measured daily with calipers. The sizes of the tumor are expressed as the products of the longest diameter times the shortest diameter (in mm²).

### EXAMPLE 17

[1222] Preparation and Administration of DNA Liposome Complexes

[1223] A representative protocol for administration of DNA-liposome complexes is as follows: DNA liposome complexes are mixed immediately prior to injection by adding 0.1 ml of lactated Ringer's solution into a sterile vial of plasmid DNA (20 mg/ml; 0.1 ml). An aliquot of this solution (0.1 ml) is added at room temperature to 0.1 ml of 150 mM (dioleoyl phosphatidylethanolamine/3β[N-(N′,N′-dimethylaminoethane)-carbamoyl]cholesterol)liposome in lactated Ringer's solution in a separate sterile vial. The DNA and liposome vials are prepared in accordance with FDA guidelines and quality control procedures. After incubation for 15 minutes at room temperature, an additional 0.5 ml of sterile lactated Ringer's solution is added to the vial and mixed. The DNA liposome solution (0.2 ml) is injected into the patient's tumor nodule under sterile conditions at the bedside after administration of local anesthesia (1% lidocaine) using a 22-gauge needle. For catheter delivery, the DNA liposome solution (0.6 ml) is delivered into the artery using percutaneous delivery. Additional protocols for administration of DNA liposomal constructs are given in Nabel, G J, Methods for Liposome-Mediated Gene Transfer to Tumor Cells in vivo, in: Methods in Molecular Medicine, Gene Therapy Protocols, Robbins P ed. Humana Press, Totowa N.J. (1996). Cationic liposomes for delivery of DNA construct to the tumor endothelium are prepared by the method of Thurston et al., J. Clin Invest., 101: 1401-1413, (1998).

### EXAMPLE 18

[1224] General Procedures for Administering Constructs in Human Tumor Models and Human Patients

[1225] The constructs described herein are tested for therapeutic efficacy in several well established rodent models which are considered to be highly representative as described in “Protocols for Screening Chemical Agents and Natural Products Against Animal Tumors and Other Biological Systems (Third Edition)”, Cancer Chemother. Reports, Part 3, 3: 1-112, which is hereby incorporated by reference in its entirety. Additional tumor models of carcinoma and sarcoma originating from primary sites and prepared as established tumors at primary and/or metastatic sites are utilized to test further the efficacy of the constructs.

### EXAMPLE 19

[1226] General Procedures for Administering Tumor Cells or Sickled Erythrocytes Transduced with SAgs and SAg-Activated T or NKT Cells in Human Tumor Models and Human Patients

[1227] A. Tumor Cells Transduced with SAg Nucleic Acids Alone or Cotransfected with Oncogenes or Nucleic Acids Encoding Potent Immunogens and Bacterial Products

[1228] In a representative protocol, using the B16 melanoma or A20 lymphoma or other models given above, 10⁵-10⁷ transfected tumor cells are implanted subcutaneously and 1-6 months later 10⁵-10⁷ untransfected tumor cells, are implanted. In the case of tumor cells cotransfected with several therapeutic nucleic acids, controls are established consisting of groups transfected with only one of the nucleic acids. These single transfectants are administered on the same schedule as the cotransfectants and assessed for capacity to prevent or reverse tumor growth compared to positive controls receiving tumor alone. The animals receiving the SAg transfected tumor cells show no evidence of growth of the wild type tumor and prolonged survival compared to the controls in which there is 100% appearance of the tumors. The differences are statistically significant. SAg transfected tumor cells are also used to treat established tumors as follows. Transfected tumor cells, 10⁵-10⁷ are given 3-10 days after the appearance of established tumors. Results show statistically significant arrest of tumor growth, prolongation of survival in treated animals compared to untreated controls.

[1229] B. SAg Activated Effector T or NKT Cells

[1230] Effector T or NKT cells are generated as described elsewhere and are infused intravenously in doses of 10⁶-10⁸ into syngeneic hosts that have pulmonary metastatic lesions established by injecting tumor cells intravenously 3 to 12 days earlier. Twenty days later, the animals are sacrificed and pulmonary metastases measured in treated animals compared to untreated controls. Results show statistically significant reduction in total number of pulmonary nodules and prolonged survival in the treated group compared to untreated control.

### EXAMPLE 20

[1231] General Test Evaluation Procedures for Constructs and SAg Activated Effector T or NKT Cells

[1232] I. General Test Evaluation Procedures

[1233] A. Calculation of Mean Survival Time

[1234] Mean survival time is calculated according to the following formula:

[1235] Mean survival time (days)=S+AS_{(A-1)}−(B+1)NT/S_{(A-1)}−NT

[1236] Definitions:

[1237] Day: Day on which deaths are no longer considered due to drug toxicity. Example: with treatment starting on Day 1 for survival systems (such as L1210, P388, B16, 3LL, and W256):

[1238] Day A: Day 6.

[1239] Day B: Day beyond which control group survivors are considered “no-takes.”

[1240] Example: with treatment starting on Day 1 for survival systems (such as L1210, P388, and W256), Day B-Day 18. For B16, transplanted AKR, and 3LL survival systems, Day B is to be established.

[1241] S: If there are “no-takes” in the treated group, S is the sum from Day A through Day B. If there are no “no-takes” in the treated group, S is the sum of daily survivors from Day A onward.

[1242] S(A-1): Number of survivors at the end of Day (A-1).

[1243] Example: for 3LE21, S(A-1)=number of survivors on Day 5.

[1244] NT: Number of “no-takes” according to the criteria given in Protocols 7.300 and 11.103.

[1245] B. T/C Computed for all treated groups

[1246] T/C is the ratio (expressed as a percent) of the mean survival time of the treated group divided by the mean survival time of the control group. Treated group animals surviving beyond Day B, according to the chart below, are eliminated from calculations:

| No. of survivors in | Percent of “no-takes” | |
|---|---|---|
| treated group beyond Day B | in control group | Conclusion |
| 1 | Any percent | “no-take” |
| 2 | <10 | drug inhibition |
| | >10 | “no-takes” |
| >3 | <15 | drug inhibitions |
| | >15 | “no-takes” |

Positive control compounds are not considered to have “no-takes” regardless of the number of “no-takes” in the control group. Thus, all survivors on Day B are used in the calculation of T/C for the positive control. Surviving animals are evaluated and recorded on the day of evaluation as “cures” or “no-takes”

[1247] Calculation of Median Survival Time

[1248] Median Survival Time is defined as the median day of death for a test or control group. If deaths are arranged in chronological order of occurrence (assigning to survivors, on the final day of observation, a “day of death” equal to that day), the median day of death is a day selected so that one half of the animals died earlier and the other half died later or survived. If the total number of animals is odd, the median day of death is the day that the middle animal in the chronological arrangement died. If the total number of animals is even, the median is the arithmetical mean of the two middle values. Median survival time is computed on the basis of the entire population and there are no deletion of early deaths or survivors, with the following exception:

[1249] C. Computation of Median Survival Time from Survivors

[1250] If the total number of animals including survivors (N) is even, the median survival time (days) (X+Y)/2, where X is the earlier day when the number of survivors is N/2, and Y is the earliest day when the number of survivors (N/2)−1. If N is odd, the median survival time (days) is X.

[1251] D. Computation of Median Survival Time from Mortality Distribution

[1252] If the total number of animals including survivors (N) is even, the median survival time (days) (X+Y)/2, where X is the earliest day when the cumulative number of deaths is N/2, and Y is the earliest day when the cumulative number of deaths is (N/2)+1. If N is odd, the median survival time (days) is X.

[1253] Cures and “No-Takes”: “Cures” and “no-takes” in systems evaluated by median survival time are based upon the day of evaluation. On the day of evaluation any survivor not considered a “no-take” is recorded as a “cure.” Survivors on day of evaluation are recorded as “cures” or “no-takes,” but not eliminated from the calculation of the median survival time.

[1254] E. Calculation of Approximate Tumor Weight from Measurement of Tumor Diameters with Vernier Calipers

[1255] The use of diameter measurements (with Vernier calipers) for estimating treatment effectiveness on local tumor size permits retention of the animals for lifespan observations.

[1256] When the tumor is implanted sc, tumor weight is estimated from tumor diameter measurements as follows. The resultant local tumor is considered a prolate ellipsoid with one long axis and two short axes. The two short axes are assumed to be equal. The longest diameter (length) and the shortest diameter (width) are measured with Vernier calipers. Assuming specific gravity is approximately 1.0, and Pi is about 3, the mass (in mg) is calculated by multiplying the length of the tumor by the width squared and dividing the product by two. Thus,

$$Tumor weight ( mg ) = \frac{length ( mm ) \times {( width [ mm ] )}^{2}}{2} Or \frac{L \times {( W )}^{2}}{2}$$

[1257] The reporting of tumor weights calculated in this way is acceptable inasmuch as the assumptions result in as much accuracy as the experimental method warrants.

[1258] F. Calculation of Tumor Diameters

[1259] The effects of a drug on the local tumor diameter may be reported directly as tumor diameters without conversion to tumor weight. To assess tumor inhibition by comparing the tumor diameters of treated animals with the tumor diameters of control animals, the three diameters of a tumor are averaged (the long axis and the two short axes). A tumor diameter T/C of 75% or less indicates activity and a T/C of 75% is approximately equivalent to a tumor weight T/C of 42%.

[1260] G. Calculation of Mean Tumor Weight from Individual Excised Tumors

[1261] The mean tumor weight is defined as the sum of the weights of individual excised tumors divided by the number of tumors. This calculation is modified according to the rules listed below regarding “no-takes.” Small tumors weighing 39 mg or less in control mice or 99 mg or less in control rats, are regarded as “no-takes” and eliminated from the computations. In treated groups, such tumors are defined as “no-takes” or as true drug inhibitions according to the following rules:

| Percent of small tumors in | Percent of “no-takes” in | |
|---|---|---|
| treated group | control group | Action |
| <17 | Any percent | no-takes |
| | 329 | |
| | | not used in |
| | | calculations |
| 18-39 | <10 | drug inhibition; |
| | | use in |
| | | calculations |
| | >10 | no-takes |
| | | not used in |
| | | calculations |
| >40 | <15 | drug inhibition; |
| | | use in |
| | | calculations |
| | >15 | Code “33” |
| | | all nontoxic tests |
| | | “33” |

[1262] Positive control compounds are not considered to have “no-takes” regardless of the number of “no-takes” in the control group. Thus, the tumor weights of all surviving animals are used in the calculation of T/C for the positive control. T/C are computed for all treated groups having more than 65% survivors. The T/C is the ratio (expressed as a percent) of the mean tumor weight for treated animals divided by the mean tumor weight for control animals. SDs of the mean control tumor weight are computed the factors in a table designed to estimate SD using the estimating factor for SD given the range (difference between highest and lowest observation). Biometrik Tables for Statisticians (Pearson E S, and Hartley H G, eds.) Cambridge Press, vol. 1, table 22, p. 165.

[1263] II. Specific Tumor Models

[1264] A. Lymphoid Leukemia L1210

[1265] Summary

[1266] Ascitic fluid from donor mouse is transferred into recipient BDF1 or CDF1 mice. Treatment begins 24 hours after implant. Results are expressed as a percentage of control survival time. Under normal conditions, the inoculum site for primary screening is i.p., the composition being tested is administered i.p., and the parameter is mean survival time. Origin of tumor line: induced in 1948 in spleen and lymph nodes of mice by painting skin with MCA. J Natl Cancer Inst. 13:1328, 1953.

[1267] Animals

[1268] Propagation: DBA/2 mice (or BDF1 or CDF1 for one generation).

[1269] Testing: BDF1 (C57BL/6×DBA/2) or CDF1 (BALB/c×DBA/2) mice.

[1270] Weight: Within a 3-g weight range, with a minimum weight of 18 g for males and 17 g for females.

[1271] Sex: One sex used for all test and control animals in one experiment.

[1272] Experiment Size: Six animals per test group.

[1273] Control Groups: Number of animals varies according to number of test groups.

[1274] Tumor Transfer

[1275] Inject i.p., 0.1 ml of diluted ascitic fluid containing 10⁵ cells.

[1276] Time of Transfer for Propagation: Day 6 or 7.

[1277] Time of Transfer for Testing: Day 6 or 7.

[1278] Testing Schedule

[1279] Day 0: Implant tumor. Prepare materials. Run positive control in every odd-numbered experiment. Record survivors daily.

[1280] Day 1: Weigh and randomize animals. Begin treatment with therapeutic composition. Typically, mice receive 1 ug of the test composition in 0.5 ml saline. Controls receive saline alone. The treatment is given as one dose per week. Any surviving mice are sacrificed after 4 weeks of therapy.

[1281] Day 5: Weigh animals and record.

[1282] Day 20: If there are no survivors except those treated with positive control compound, evaluate study.

[1283] Day 30: Kill all survivors and evaluate experiment.

[1284] Quality Control

[1285] Acceptable control survival time is 8-10 days. Positive control compound is 5-fluorouracil; single dose is 200 mg/kg/injection, intermittent dose is 60 mg/kg/injection, and chronic dose is 20 mg/kg/injection. Ratio of tumor to control (T/C) lower limit for positive control compound is 135%.

[1286] Evaluation

[1287] Compute mean animal weight on Days 1 and 5, and at the completion of testing compute T/C for all test groups with >65% survivors on Day 5. A T/C value 85% indicates a toxic test. An initial T/C 125% is considered necessary to demonstrate activity. A reproduced T/C 125% is considered worthy of further study. For confirmed activity a composition should have two multi-dose assays that produce a T/C 125%.

[1288] B. Lymphocytic Leukemia P388

[1289] Summary

[1290] Ascitic fluid from donor mouse is implanted in recipient BDF1 or CDF1 mice. Treatment begins 24 hours after implant. Results are expressed as a percentage of control survival time. Under normal conditions, the inoculum site for primary screening is ip, the composition being tested is administered ip daily for 9 days, and the parameter is median survival time. Origin of tumor line: induced in 1955 in a DBA/2 mouse by painting with MCA. Scientific Proceedings, Pathologists and Bacteriologists 33:603, 1957.

[1291] Animals

[1292] Propagation: DBA/2 mice (or BDF1 or CDF1 for one generation)

[1293] Testing: BDF1 (C57BL/6×DBA/2) or CDF1 (BALB/c×DBA/2) mice.

[1294] Weight: Within a 3-g weight range, with a minimum weight of 18 g for males and 17 g for females.

[1295] Sex: One sex used for all test and control animals in one experiment.

[1296] Experiment Size: Six animals per test group.

[1297] Control Groups: Number of animals varies according to number of test groups.

[1298] Tumor Transfer

[1299] Implant: Inject ip

[1300] Size of Implant: 0.1 ml diluted ascitic fluid containing 10⁶ cells.

[1301] Time of Transfer for Propagation: Day 7.

[1302] Time of Transfer for Testing: Day 6 or 7.

[1303] Testing Schedule

[1304] Day 0: Implant tumor. Prepare materials. Run positive control in every odd-numbered experiment. Record survivors daily.

[1305] Day 1: Weigh and randomize animals. Begin treatment with therapeutic composition.

[1306] Typically, mice receive lug of the composition being tested in 0.5 ml saline. Controls receive saline alone. The treatment is given as one dose per week. Any surviving mice are sacrificed after 4 weeks of therapy.

[1307] Day 5: Weigh animals and record.

[1308] Day 20: If there are no survivors except those treated with positive control compound, evaluate experiment.

[1309] Day 30: Kill all survivors and evaluate experiment.

[1310] Quality Control

[1311] Acceptable median survival time is 9-14 days. Positive control compound is 5-fluorouracil: single dose is 200 mg/kg/injection, intermittent dose is 60 mg/kg/injection, and chronic dose is 20 mg/kg/injection. T/C lower limit for positive control compound is 135% Check control deaths, no takes, etc.

[1312] Evaluation

[1313] Compute mean animal weight on Days 1 and 5, and at the completion of testing compute T/C for all test groups with >65% survivors on Day 5. A T/C value 85% indicates a toxic test. An initial T/C 125% is considered necessary to demonstrate activity. A reproduced T/C 125% is considered worthy of further study. For confirmed activity a synthetic must have two multi-dose assays (each performed at a different laboratory) that produce a T/C 125%; a natural product must have two different samples that produce a T/C 125% in multi-dose assays.

[1314] C. Melanotic Melanoma B16

[1315] Summary

[1316] Tumor homogenate is implanted ip or sc in BDF1 mice. Treatment begins 24 hours after either ip or sc implant or is delayed until an sc tumor of specified size (usually approximately 400 mg) can be palpated. Results expressed as a percentage of control survival time. The composition being tested is administered ip, and the parameter is mean survival time. Origin of tumor line: arose spontaneously in 1954 on the skin at the base of the ear in a C57BL/6 mouse. Handbook on Genetically Standardized Jax Mice. Roscoe B. Jackson Memorial Laboratory, Bar Harbor, Me., 1962. See also Ann NY Acad. Sci 100, Parts 1 and 2, 1963.

[1317] Animals

[1318] Propagation: C57BL/6 mice.

[1319] Testing: BDF1 (C57BL/6×DBA/2) mice.

[1320] Weight: Within a 3-g weight range, with a minimum weight of 18 g for males and 17 g for females.

[1321] Sex: One sex used for all test and control animals in one experiment.

[1322] Experiment Size: Ten animals per test group. For control groups, the number of animals varies according to number of test groups.

[1323] Tumor Transfer

[1324] Propagation: Implant fragment sc by trochar or 12-gauge needle or tumor homogenate (see below) every 10-14 days into axillary region with puncture in inguinal region.

[1325] Testing: Excise sc tumor on Day 10-14.

[1326] Homogenate: Mix 1 g or tumor with 10 ml of cold balanced salt solution and homogenize, and implant 0.5 ml of this tumor homogenate ip or sc.

[1327] Fragment: A 25-mg fragment may be implanted sc.

[1328] Testing Schedule

[1329] Day 0: Implant tumor. Prepare materials. Run positive control in every odd-numbered experiment. Record survivors daily.

[1330] Day 1: Weigh and randomize animals. Begin treatment with therapeutic composition.

[1331] Typically, mice receive 1 mg of the composition being tested in 0.5 ml saline. Controls receive saline alone. The treatment is given as one dose per week. Any surviving mice are sacrificed 8 weeks of therapy.

[1332] Day 5: Weigh animals and record.

[1333] Day 60: Kill all survivors and evaluate experiment.

[1334] Quality Control

[1335] Acceptable control survival time is 14-22 days. Positive control compound is 5-fluorouracil: single dose is 200 mg/kg/injection, intermittent dose is 60 mg/kg/injection, and chronic dose is 20 mg/kg/injection. TIC lower limit for positive control compound is 135% Check control deaths, no takes, etc.

[1336] Evaluation

[1337] Compute mean animal weight on Days 1 and 5, and at the completion of testing compute T/C for all test groups with >65% survivors on Day 5. A T/C value 85% indicates a toxic test. An initial T/C 125% is considered necessary to demonstrate activity. A reproduced T/C 125% is considered worthy of further study. For confirmed activity a therapeutic composition should have two multi-dose assays that produce a T/C 125%.

[1338] Metastasis After IV Injection of Tumor Cells

[1339] 10⁵ B16 melanoma cells in 0.3 ml saline are injected intravenously in C57BL/6 mice. The mice are treated intravenously with 1 g of the composition being tested in 0.5 ml saline. Controls receive saline alone. The treatment is given as one dose per week. Mice sacrificed after 4 weeks of therapy, the lungs are removed and metastases are enumerated.

[1340] C. 3LL Lewis Lung Carcinoma

[1341] Summary

[1342] Tumor may be implanted sc as a 2-4 mm fragment, or im as a 2×10⁶-cell inoculum. Treatment begins 24 hours after implant or is delayed until a tumor of specified size (usually approximately 400 mg) can be palpated. The composition being tested is administered ip daily for 11 days and the results are expressed as a percentage of the control.

[1343] Origin of tumor line: arose spontaneously in 1951 as carcinoma of the lung in a C57BL/6 mouse. Cancer Res 15:39, 1955. See, also Malave, I. et al., J. Nat'l. Canc. Inst. 62:83-88 (1979).

[1344] Animals

[1345] Propagation: C57BL/6 mice.

[1346] Testing: BDF1 mice or C3H.

[1347] Weight: Within a 3-g weight range, with a minimum weight of 18 g for males and 17 g for females.

[1348] Sex: One sex used for all test and control animals in one experiment.

[1349] Experiment Size: Six animals per test group for sc implant, or ten for im implant. For control groups, the number of animals varies according to number of test groups.

[1350] Tumor Transfer

[1351] Implant: Inject cells im in hind leg or implant fragment sc in axillary region with puncture in inguinal region.

[1352] Time of Transfer for Propagation: Days 12-14.

[1353] Time of Transfer for Testing: Days 12-14.

[1354] Testing Schedule

[1355] Day 0: Implant tumor. Prepare materials. Run positive control in every odd-numbered experiment. Record survivors daily.

[1356] Day 1: Weigh and randomize animals. Begin treatment with therapeutic composition.

[1357] Typically, mice receive 1 ug of the composition being tested in 0.5 ml saline. Controls receive saline alone. The treatment is given as one dose per week. Any surviving mice are sacrificed after 4 weeks of therapy.

[1358] Day 5: Weigh animals and record.

[1359] Final Day: Kill all survivors and evaluate experiment.

[1360] Ouality Control

[1361] Acceptable im tumor weight on Day 12 is 500-2500 mg. Acceptable im tumor median survival time is 18-28 days. Positive control compound is cyclophosphamide: 20 mg/kg/injection, qd, Days 1-11. Check control deaths, no takes, etc.

[1362] Evaluation

[1363] Compute mean animal weight when appropriate, and at the completion of testing compute T/C for all test groups. When the parameter is tumor weight, a reproducible T/C 42% is considered necessary to demonstrate activity. When the parameter is survival time, a reproducible T/C 125% is considered necessary to demonstrate activity. For confirmed activity a synthetic must have two multi-dose assays (each performed at a different laboratory); a natural product must have two different samples.

[1364] D. 3LL Lewis Lung Carcinoma Metastasis Model

[1365] This model has been utilized by a number of investigators. See, for example, Gorelik, E. et al., J. Nat'l. Canc. Inst. 65:1257-1264 (1980); Gorelik, E. et al., Rec. Results Canc. Res. 75:20-28 (1980); Isakov, N. et al., Invasion Metas. 2:12-32 (1982) Talmadge J. E. et al., J. Nat'l. Canc. Inst. 69:975-980 (1982); Hilgard, P. et al., Br. J. Cancer 35:78-86(1977)).

[1366] Mice: male C57BL/6 mice, 2-3 months old.

[1367] Tumor: The 3LL Lewis Lung Carcinoma was maintained by sc transfers in C57BL/6 mice. Following sc, im or intra-footpad transplantation, this tumor produces metastases, preferentially in the lungs. Single-cell suspensions are prepared from solid tumors by treating minced tumor tissue with a solution of 0.3% trypsin. Cells are washed 3 times with PBS (pH 7.4) and suspended in PBS. Viability of the 3LL cells prepared in this way is generally about 95-99% (by trypan blue dye exclusion). Viable tumor cells (3×10⁴-5×10⁶) suspended in 0.05 ml PBS are injected into the right hind foot pads of C57BL/6 mice. The day of tumor appearance and the diameters of established tumors are measured by caliper every two days.

[1368] Typically, mice receive lug of the composition being tested in 0.5 ml saline. Controls receive saline alone. The treatment is given as one or two doses per week. In experiments involving tumor excision, mice with tumors 8-10 mm in diameter are divided into two groups. In one group, legs with tumors are amputated after ligation above the knee joints. Mice in the second group are left intact as nonamputated tumor-bearing controls. Amputation of a tumor-free leg in a tumor-bearing mouse has no known effect on subsequent metastasis, ruling out possible effects of anesthesia, stress or surgery. Surgery is performed under Nembutal anesthesia (60 mg veterinary Nembutal per kg body weight).

[1369] Determination of Metastasis Spread and Growth

[1370] Mice are killed 10-14 days after amputation. Lungs are removed and weighed. Lungs are fixed in Bouin's solution and the number of visible metastases is recorded. The diameters of the metastases are also measured using a binocular stereoscope equipped with a micrometer-containing ocular under 8×magnification. On the basis of the recorded diameters, it is possible to calculate the volume of each metastasis. To determine the total volume of metastases per lung, the mean number of visible metastases is multiplied by the mean volume of metastases. To further determine metastatic growth, it is possible to measure incorporation of ¹²⁵IdUrd into lung cells (Thakur, M. L. et al., J. Lab. Clin. Med. 89:217-228 (1977). Ten days following tumor amputation, 25 mg of FdUrd is inoculated into the peritoneums of tumor-bearing (and, if used, tumor-resected mice. After 30 min, mice are given 1 mCi of ¹²⁵IdUrd. One day later, lungs and spleens are removed and weighed, and a degree of ¹²⁵IdUrd incorporation is measured using a gamma counter.

[1371] Statistics

[1372] Values representing the incidence of metastases and their growth in the lungs of tumor-bearing mice are not normally distributed. Therefore, non-parametric statistics such as the Mann-Whitney U-Test may be used for analysis.

[1373] Study of this model by Gorelik et al. (1980, supra) showed that the size of the tumor cell inoculum determined the extent of metastatic growth. The rate of metastasis in the lungs of operated mice was different from primary tumor-bearing mice. Thus in the lungs of mice in which the primary tumor had been induced by inoculation of large doses of 3LL cells (1-5×10⁶) followed by surgical removal, the number of metastases was lower than that in nonoperated tumor-bearing mice, though the volume of metastases was higher than in the nonoperated controls. Using ¹²⁵IdUrd incorporation as a measure of lung metastasis, no significant differences were found between the lungs of tumor-excised mice and tumor-bearing mice originally inoculated with 1×10⁶ 3LL cells. Amputation of tumors produced following inoculation of 1×10⁵ tumor cells dramatically accelerated metastatic growth. These results were in accord with the survival of mice after excision of local tumors. The phenomenon of acceleration of metastatic growth following excision of local tumors had been observed by other investigators. The growth rate and incidence of pulmonary metastasis were highest in mice inoculated with the lowest doses (3×10⁴−1×10⁵ of tumor cells) and characterized also by the longest latency periods before local tumor appearance. Immunosuppression accelerated metastatic growth, though nonimmunologic mechanisms participate in the control exerted by the local tumor on lung metastasis development. These observations have implications for the prognosis of patients who undergo cancer surgery.

[1374] E. Walker Carcinosarcoma 256

[1375] Summary

[1376] Tumor may be implanted sc in the axillary region as a 2-6 mm fragment, im in the thigh as a 0.2-ml inoculum of tumor homogenate containing 10⁶ viable cells, or ip as a 0.1-ml suspension containing 10⁶ viable cells. Treatment of the composition being tested is usually ip. Origin of tumor line: arose spontaneously in 1928 in the region of the mammary gland of a pregnant albino rat. J. Natl. Cancer Inst 13:1356, 1953.

[1377] Animals

[1378] Propagation: Random-bred albino Sprague-Dawley rats.

[1379] Testing: Fischer 344 rats or random-bred albino rats.

[1380] Weight Range: 50-70 g (maximum of 10-g weight range within each experiment).

[1381] Sex: One sex used for all test and control animals in one experiment.

[1382] Experiment Size: Six animals per test group. For control groups, the number of animals varies according to number of test groups.

[1383] Time of Tumor Transfer

[1384] Time of Transfer for Propagation: Day 7 for im or ip implant; Days 11-13 for sc implant.

[1385] Time of Transfer for Testing: Day 7 for im or ip implant; Days 11-13 for sc implant.

[1386] Tumor Transfer

[1387] Sc fragment implant is by trochar or 12-gauge needle into axillary region with puncture in inguinal area. Im implant is with 0.2 ml of tumor homogenate (containing 10⁶ viable cells) into the thigh. Ip implant is with 0.1 ml of suspension (containing 10⁶ viable cells) into the ip cavity.

[1388] Testing Schedule

[1389] Prepare and administer compositions under test on days, weigh animals, and evaluate test on the days listed in the following tables.

| | | Administer | | |
|---|---|---|---|---|
| Test system | Prepare drug | drug | Weight animals | Evaluate |
| 5WA16 | 2 | 3-6 | 3 and 7 | 7 |
| 5WA12 | 0 | 1-5 | 1 and 5 | 10-14 |
| 5WA31 | 0 | 1-9 | 1 and 5 | 30 |

[1390] Day 0: Implant tumor. Prepare materials. Run positive control in every odd-numbered experiment. Record survivors daily.

[1391] Day 1: Weigh and randomize animals.

[1392] Final Day: Kill all survivors and evaluate experiment.

[1393] Quality Control

[1394] Acceptable im tumor weight or survival time for the above three test systems:

[1395] 5WA16: 3-12 g. 5WA12: 3-12 g. 5WA31 or 5WA21: 5-9 days.

[1396] Evaluation

[1397] Compute mean animal weight when appropriate, and at the completion of testing compute T/C for all test groups. When the parameter is tumor weight, a reproducible T/C 42% is considered necessary to demonstrate activity. When the parameter is survival time, a reproducible T/C 125% is considered necessary to demonstrate activity. For confirmed activity a therapeutic agent must have activity in two multi-dose assays.

[1398] F. A20 Lymphoma

[1399] 10⁶ murine A20 lymphoma cells in 0.3 ml saline are injected subcutaneously in Balb/c mice. The mice are treated intravenously with Ig of the composition being tested in 0.5 ml saline. Controls receive saline alone. The treatment is given as one dose per week.

[1400] Tumor growth is monitored daily by physical measurement of tumor size and calculation of total tumor volume. After 4 weeks of therapy the mice are sacrificed.

[1401] Treatment Regimens and Results (Constructs)

[1402] For determining efficacy in the tumor models described above the general categories of therapeutic constructs used are given below. For all of the classes of conjugates listed below, the SAg component can be prepared as either a DNA encoding SAg or as the SAg polypeptide itself. In either form the SAg DNA or protein may be conjugated to additional molecules, either nucleic acid or polypeptides. Operationally, for therapeutic use in vivo or ex vivo, these conjugates may be prepared by chemical coupling or by recombinant means (whichever is appropriate) and conjugated to a tumor-targeting structure or incorporated into a vehicle (e.g., liposomes) that themselves comprise a tumor targeting structure(s). Again, examples of such targeting structures include, but are not limited to, an antibody, antigen, receptor or receptor ligand. Methods are disclosed in Examples 1, 3, 4, 5, 6, 7, 14, 17, 18, 30-32.

[1403] 1. SAg Nucleic Acid Constructs including Phage Displays and SAg Transfected Bacterial Cells

[1404] 2. Glycosylated SAgs

[1405] 3. Chimeric SAgs

[1406] Conjugates having a Superantigen component (polypeptide or nucleic acid) and a partner that is either a single component or a conjugate of 2 or more components (protein, carbohydrate, lipid or DNA) as indicated below.

| Superantigen (Protein or DNA) | Partner (Single Component or Conjugate) |
|---|---|
| 4. | DNA coding sequence |
| 5. | Polypeptide |
| 6. | Nucleic acid |
| 7. | Tumor associated Peptide |
| 8. | Tumor Antigen-MHC protein |
| 9. | LPS |
| 10. | Lipoarabinomannan |
| 11. | Ganglioside |
| 12. | Glycosphingolipid |
| 13. | Ganglioside-CD1 receptor |
| 14. | Glycosphingolipid-CD1 receptor |
| 15. | Glycosylceramide (e.g., Gal-Cer) |
| 16. | GalCer-CD1 receptor |
| 17. | Gal |
| 18. | Arg-Gly-Asp or Asn-Gly-Arg |
| 19 | iNOS |
| 20. | Gb2 or Gb3 or Gb4 |
| 21. | (Gb2 or Gb3 or Gb4)-CD1 receptor |
| 22. | -GPI-(Gb2 or Gb3 or Gb4) |
| 23. | -GPI-(Gb2 or Gb3 or Gb4)-CD1 receptor |
| 24. | Verotoxin |
| 25. | Verotoxin A or B Subunit |
| 26. | IFNα receptor peptide homologous to VT |
| 27. | CD19 peptide homologous to VT |
| 28. | LDL, VLDL, HDL, IDL |
| 29. | Apolipoproteins (e.g., Lp(a), apoB-100, apoB-48, apoE) |
| 30. | OxyLDL, oxyLDL mimics, (e.g., 7b-hydroperoxycholesterol, 7β- |
| | hydroxycholesterol, 7-ketocholesterol, 5α-6α-epoxycholesterol, 7β- |
| | hydroperoxy-choles-5-en-3b-ol, 4-hydroxynonenal (4-HNE), 9- |
| | HODE, 13-HODE and cholesterol-9-HODE) |
| 31. | OxyLDL by products (e.g. lysolecithin, lysophosphatidylcholine, |
| | malondialdehyde, 4-hydroxynonenal) |
| 32. | LDL & oxyLDL receptors (e.g., LDL oxyLDL, acetyl-LDL, VLDL, |
| | LRP, CD36, SREC, LOX-1, macrophage scavenger receptors) |
| 33. | phytosphingosine, -GPI-phytosphingosine |
| 34. | tumor associated lipid antigens |
| 35. | glycolipid, proteolipid, glycosphingolipid, sphingolipid |
| | with inositolphosphate -containing head groups, |
| | phytoglycolipids, mycoglycolipids, -GPI-sphingosines, |
| | -GPI-lipids |
| 36. | sphingolipids with inositolphosphate-containing head |
| | groups having the general structure: |
| | ceramide-P-myoinositol-X with X referring to polar |
| | substituents comprising ceramide-p-inositol-mannose, |
| | inositol-1-P-(6)mannose(a1,2 inositol-1P-(1)ceramide, |
| | (inositol-P)2-ceramide, inositol-P-inositol-P-ceramide, |
| | inositol-P-inositol-P-ceramide. |
| 37. | tumor associated glycan antigens consisting of |
| | peptidoglycans or glycan phosphotidyinositol (GPI) |
| | structures |

[1407] Vaccine Use

[1408] For use as a vaccine, the constructs are administered subcutaneously, intramuscularly intradermally or intraperitoneally in doses ranging from 50 to 500 ng in various vehicles such as Freund's adjuvant, aluminum hydroxide, pluruonic acid triblock and liposomes as described in the art. Doses may be repeated every 10 days. Tumors are implanted after the last dose. A control group does not receive the vaccine.

[1409] Use in Established Tumors

[1410] For proteins or nucleic acid constructs, treatment consists of injecting animals iv or ip with 50, 500 1000 or 5,000 ng of in 0.1-0.5 ml of normal saline. Unless indicated otherwise above, treatments are given one to three times per week for two to five weeks. Phage displays, yeast displays and vesilcle, SAg-bacterial or viral constructs or SAg vesicles are administered as 10⁹ transducing units (TU) and irradiated bacterial cells, yeast cells as 10⁵-10⁶ cells iv into the tail vein one to three times per week for two to five weeks or directly into tumor in 30-75% or the iv doses on the same schedule. Exosomes or vesicles, harvested from transfected, transformed or fusion tumor cells or sickled cells or mutant yeast are given i.v. into the tail vein in a dose of 0.25-1 g per animal one to three times per week for two to five weeks. The results shown in Table VI are for each composition and dose tested. The results are statistically significant by the Wilcoxon rank sum test.

[1411] Treatment regimens for SAg activated effector T or NKT cells are in Example 16, 18, 19. The preferred animal model for evaluation of the adoptively transferred T or NKT effector cells is the MCA 205/207 fibrosarcoma with pulmonary metastases (Shu S. et al., J. Immunol. 152: 1277-1288 (1994)). The other models given in Example 20 are also suitable for evaluation of the therapeutic effectiveness of the effector T cells.

TABLE VI

| Tumor Model | Parameter | % of Control Response |
|---|---|---|
| L1210 | Mean survival time | >130% |
| P388 | Mean survival time | >130% |
| B16 | Mean survival time | >130% |
| B16 metastasis | Median number of metastases | <70% |
| 3LL | Mean survival time | >130% |
| | Mean tumor weight | <40% |
| 3LL metastasis | Median survival time | >130% |
| | Mean lung weight | <60 |
| | Median number of metastases | <60% |
| | Median volume of metastases | <60% |
| | Medial volume of metastases | <60% |
| | Median uptake of IdUrd | <60% |
| Walker carcinoma | Median survival time | >130% |
| | Mean tumor weight | <40% |
| A20 | Mean survival time | >130% |
| | Mean tumor volume | <40% |

### EXAMPLE 22

[1412] Antitumor Effects of Therapeutic Constructs and Effector T, NKT Cells or Sickled Erythrocytes in Human Patients

[1413] All patients treated have histologically confirmed malignant disease including carcinomas, sarcomas, melanomas, lymphomas and leukemia and have failed conventional therapy. Patients may be diagnosed as having any stage of metastatic disease involving any organ system. Staging describes both tumor and host, including organ of origin of the tumor, histologic type and histologic grade, extent of tumor size, site of metastases and functional status of the patient. A general classification includes the known ranges of Stage I (localized disease) to Stage 4(widespread metastases). Patient history is obtained and physical examination performed along with conventional tests of cardiovascular and pulmonary function and appropriate radiologic procedures. Histopathology is obtained to verify malignant disease.

### EXAMPLE 23

### Treatment Procedures

[1414] Constructs (or Preparations)

[1415] Doses of the constructs are determined as described above using, inter alia, appropriate animal models of tumors. Two classes of therapeutic compositions are administered namely SAg proteins or SAg conjugates (nucleic acids or peptides-polypeptides), SAg phage displays, SAg yeast displays, SAg bacterial cell displays, as described above for animal models.

[1416] A treatment consists of injecting the patient with 0.5-500 mg of Construct intravenously in 200 ml of normal saline over a one hour period. Treatments are given 3×/week for a total of 12 treatments. Patients with stable or regressing disease are treated beyond the 12^{th} treatment. Treatment is given on either an outpatient or inpatient basis as needed.

[1417] Effector T or NKT Cells

[1418] Eligible patients are treated with tumor antigens such as irradiated tumor cells or GM-CSF transduced tumor cells injected approximately 10 centimeters from a draining lymph node site. Ten days post injection, draining lymph nodes are obtained in a limited surgical procedure at the site draining the injection. The lymph nodes are converted to a single cell suspension of lymphocytes and these are incubated with various SAg preparations for two days followed by IL-2 for an additional 72 hours. These lymphocytes now called effector T cells or NKT cell are used for adoptive immunotherapy.

[1419] Effector T or NKT cells harvested by centrifugation at 500×g for 15 min and the cell pellets are pooled. After washing the cells in HBSS, the cell are resuspended in 200 ml of normal saline containing 5% human serum albumin and 450,000 IU of IL-2 for transfer. Each recipient will receive four escalating doses or 33 million, 100 million, 330 million and 1 billion cells per square meter of body surface area each given one week apart. Cells are infused through a subclavian central venous catheter over a 30-minute interval. IL-2 administration i.v. is commenced immediately after completion of cell infusion at a dose and schedule of 180,000 IU/ml every 8 h. for 5 days. All patients receive indomethacin (50 mg P.O.) every 8 h, acetaminophen (650 mg P.O.) every 6 h. and ranitidine (150 mg P.O.) every 12 h while receiving IL-2 in order to reduce febrile and gastric side effects. As controls, a cohort of patients is treated with the in vivo tumor vaccination step and IL-2 without the tumor effector cells. Patients will be followed for clinical response every 4 weeks for 2 months with repeat radiological examinations.

[1420] Abbreviated Exemplary Human Protocol: Sequential Administration of GM-CSF Transduced Tumor Cells In vivo and SAg Activated NKT and T Cells ex vivo in Patients with Metastatic Renal Cell Carcinoma and Melanoma

[1421] In vivo Phase: Immunization with GM-CSF Transduced Tumor Cells

[1422] Day 1: GM CSF transfected tumor cells (renal carcinoma/melanoma) are injected as given in Phase I GM-CSF Gene Transduction Protocol [Human Gene Therapy 6: 347-368, (1995)]

[1423] Day 7-10: Lymph Nodes draining the GM-CSF transfected tumor cell sites are removed and placed in tissue culture OR patients are pheresed and their peripheral blood T cells and NKT cells collected for further treatment in tissue culture as described below.

[1424] Ex vivo Phase: Immunization with SAg

[1425] 1. The T cells are obtained from either lymph nodes draining GM-CSF transduced tumor cell immunization or peripheral blood and subdivided into CD4+CD8+ (T cell) and CD4−CD8− (NKT cell) populations.

[1426] 2. SAg enterotoxin B is added to cultures of the NKT and T cell populations for 48 hours.

[1427] 3. The NKT cells and T cells are further expanded for an additional 72 hours (optional).

[1428] SAg Activated NKT and/or T Cell Administration

[1429] 1. The CD4+CD8+ (T cell) and CD4−CD8− (NKT) populations are harvested for injection into patients.

[1430] 2. T cells or NKT cells are administered with a mean 1011 cells per patient.

[1431] Assessment

[1432] 1. T cells phenotypes for NKT cell markers, V expression, CD44, CD62 are carried out on lymph node and peripheral blood T cells or NKT cells immediately after their removal and at various intervals after ex vivo SAg stimulation and expansion.

[1433] 2. Tumor and DTH assessment are as described in the Phase I Protocol on GM-CSF Transduction [Human Gene Therapy 6: 347-368 (1995)].

[1434] Patient Evaluation

[1435] Assessment of response of the tumor to the therapy is made once per week during therapy and 30 days thereafter. Depending on the response to treatment, side effects, and the health status of the patient, treatment is terminated or prolonged from the standard protocol given above. Tumor response criteria are those established by the International Union Against Cancer and are listed in Table VII.

TABLE VII

| RESPONSE | DEFINITION |
|---|---|
| Complete remission (CR) | Disappearance of all evidence of disease |
| Partial remission (PR) | >50% decrease in the product of the two greatest |
| | perpendicular tumor diameters; no new lesions |
| Less than partial remission (<PR) | 25-50% decrease in tumor size, stable for at least 1 |
| | month |
| Stable disease | <25% reduction in tumor size; no progression or |
| | new lesions |
| Progression | >25% increase in size of any one measured lesion or |
| | appearance of new lesions despite stabilization or |
| | remission of disease in other measured sites |

[1436] The efficacy of the therapy in a population is evaluated using conventional statistical methods including, for example, the Chi Square test or Fisher's exact test. Long-term changes in and short term changes in measurements can be evaluated separately.

[1437] Results

[1438] One hundred and fifty patients are treated. The results are summarized in Table VIII. Positive tumor responses are observed in 80% of the patients as follows:

TABLE VIII
All Patients

| Response | No. | % |
|---|---|---|
| PR | 20 | 66% |
| <PR | 10 | 33% |

| Tumor Types | Response | % of Patients |
|---|---|---|
| Breast Adenocarcinoma | PR +< PR | 80% |
| Gastrointestinal Carcinoma | PR +< PR | 75% |
| Lung Carcinoma | PR +< PR | 75% |
| Prostate Carcinoma | PR +< PR | 75% |
| Lymphoma/Leukemia | PR +< PR | 75% |
| Head and Neck Cancer | PR +< PR | 75% |
| Renal and Bladder Cancer | PR +< PR | 75% |
| Melanoma | PR +< PR | 75% |

### EXAMPLE 24

[1439] Preparation of DCs

[1440] Splenocytes obtained from naive C57BL/6 females are treated with ammonium chloride Tris buffer for 3 min at 37° C. to deplete red blood cells. Splenocytes (3 ml) at 2×10⁷ cells/ml are layered over 2 ml metrizamide gradient column (Nycomed Pharma AS, Oslo, Norway; analytical grade, 14.5 g added to 100 ml PBS, pH 7.0) and centrifuged at 600 g for 10 mm. The DC-enriched fraction from the interface is further enriched by adherence for 90 mm. Adherent cells (mostly DC and a few contaminating macrophages) are retrieved by gentle scraping and subjected to a second round of adherence at 37° C. for 90 min to deplete the contaminating macrophages. Non-adherent cells are pooled as splenic DC, and by FACS® analysis are ˜80-85% DC (stainwith mAb 33D1), 1-2% macrophages (stain with mAb F4/80), 10% T cells, and <5% B cells. The pellet is resuspended and enriched for macrophages by two rounds of adherence at 37° C. for 90 mm each. More than 80% of the adherent population is identified as macrophages by FACS® analysis with 5% lymphocytes and <5% DC. B cells are separated from the non-adherent population (B and T cells) by panning on anti-Ig-coated plates. The separated cell population which is comprised of >80% T lymphocytes by FACS analysis is used as responder T cells

[1441] Generation of Bone Marrow-Derived DCs

[1442] Erythrocyte depleted mouse bone marrow cells from flushed marrow cavities are cultured in CM with 10 ng/ml GM-CSF and 10 ng/ml IL-4 at 1×10⁶ cells/ml. On day 7, DCs are harvested by gentle pipetting and are enriched by 14.5% (by weight) metrizamide (Sigma) CM gradients. The low density interface containing the DC is collected by gentle pipette aspiration. The floating DCs express CD11b, CD11c, CD86, DEC2O5, MHC class I and II and CD4O. They are negative or low for CD3 and B220 expression.

[1443] DC Cultures

[1444] Mouse BM-DCs are prepared in CM with IL-4 and GM-CSF (1000 IU/ml each). The DC are washed twice with CM, enumerated purity >90% by positive coexpression of MIHC class II, CD40, CD80, CD86, and CD11c by fluorescence-activated cell sorter (ACS)], and cultured in CM with added cytokines for further studies. Human-monocyte-derived DCs are obtained from the adherent fraction of mononuclear cells of healthy volunteers and are incubated 7-8 days in AMV containing L-Glu, antibiotics and rhIL-4 and rhGM-CSF (1000 IU/ml each, Schering Plough, Kenilworth, N.J., USA). After 8 days in culture, the loosely adherent or floating cells show typical dendritic morphology, express high levels of MHC class I and II molecules, CD40 and CD86; most are positive for CD1a and CD11c but low or negative for CD2, CD3, CD14, CD19 and CD83.

### EXAMPLE 25

[1445] Preparation of DC/Tumor Cells Hybrids (DC/tc)

[1446] DCs derived from BM culture are fused with tumor cells at a 3:1 (DC:tumor cell) ratio using polyethylene glycol (PEG; MW=1450)/DMSO solution (Sigma). In brief, tumor cells are cultured in CM supplemented with 20% FCS and 1×OPI solution (oxaloacetate, pyruvate, and insulin; Sigma) for 4-6 h before fusion. Tumor cells and DCs are then mixed and washed with serum-free medium. After removing the medium, 1 ml of PEG is added to the cell pellet while resuspending the cells by stirring for 2 min. An additional 10 ml of serum-free medium is added to the cell suspension over the next 3 min. with continued stirring. The cells are centrifuged at 400×g for 5 mm. The cells are resuspended with 20% FCS CM and cultured for 24 h before staining or being used as targets or vaccines. Fusion preparations of DCs with B16 or RMA-S are termed B16/DC and RMA-S/DC, respectively.

[1447] Phenotype Staining of Fused Hybrid Cells

[1448] B16, RMA-S, DCs, and their fused hybrids are analyzed by staining with FITC- or PE-conjugated mAbs (PharMingen) against MHC antigens (D^{b}, K^{b}, IA^{b}) adhesion and costimulatory molecules (B7.1, ICAM-1) and lymphocyte antigens (Thy-1.2, Sm1g) at 4° C. for 45 min. DCs were identified by labeling with mAb against CD11c (N418). B16, B16/DC or B16/B16 fused cells are stained with mAb against AKV Env gp85 protein (M562, provided by Dr. Masaru Taniguchi, Chiba University, Tokyo, Japan) as a B16 tumor-specific marker. RMA-S and RMA-S/DC fused cells are stained with Thy-1.2 or mAb against the R-MuLV-encoded Gag p12 protein (584, provided by Dr. Bruce Chesebro, National Institute of Allergy and Infectious Diseases, Hamilton, Mo.) as RMA-S tumor-derived markers. The method for labeling cells with TRITC (rhodamine) is described. Briefly, cells are resuspended in RPMI 1640 at 1×10⁶ cells/ml and incubated with TR1TC (0.5 g/ml) in 37° C. for 45 mm. The labeled cells are washed three times and used for fusion studies. The phenotypes of fresh and cultured LN T cells is determined by FACS analysis following staining with FITC- or PE-conjugated mAbs against Thy-1.2, Lyt-2, and L3T4 (PharMingen). All cells are washed twice with HBSS and fixed with 0.2% paraformaldehyde. Fluorescence intensity and positive cell percentage were measured on a FACScan flow microfluorometer (Becton Dickinson, Sunnyvale, Calif.).

[1449] Additional Fusion Methods

[1450] Murine (CS 7BL16) MC38 adenocarcinoma cells are stably transfected with the DF3/MUC1 cDNA (MC38/MUC1). MC38, MC38/MUC1 and the syngeneic MB49 bladder cancer cells are maintained in DMEM supplemented with 10% heat-inactivated fetal calf serum (FCS), 2 mM glutamine, 100 U/ml penicillin and 100 mg/ml streptomycin. DCs are obtained as described from bone marrow culture with certain modifications. Briefly, bone marrow is flushed from long bones, and red cells are lysed with ammonium chloride. Lymphocytes, granulocytes and Ia⁺ cells are depleted from the bone marrow cells by incubation with the following mAbs: (1) 2.43, anti-CD8 (TIB 210; American Type Culture Collection, Rockville, Md.); (2) GK1.5, anti-CD4 (TIB 207); (3) RA3-3A1/6.1, anti B220/CD45R (TIB 146); (4) B21-2, anti-Ia (TIB 229); and (5) RB6-8C5, anti-Gr-1 (PharMingen, San Diego, Calif.) and then rabbit complement. The cells are plated in six-well culture plates in RPMI 1640 medium supplemented with 5% heat-inactivated FCS, 50 M 2-mercaptoethanol, 1 mM HEPES (pH 7.4), 2 mM glutamine, 10 U/ml penicillin, 100 mg/ml streptomycin and 500 U/ml recombinant murine GM-CSF (Boehringer Mannheim, Indianapolis, Ind.). At day 7 of culture, nonadherent and loosely adherent cells are collected and replated in 100-mm petri dishes (10⁶ cells/ml; 8 ml/dish). The nonadherent cells are washed away after 30 mm of incubation, and GM-CSF in RPMI medium is added to the adherent cells. After 18 h, the nonadherent cell population is removed for fusion with MC38/MUC1 or MC38. Fusion is carried out with 50% PEG in Dulbecco's PBS without Ca²⁺ or Mg²⁺ at pH 7.4. The fused cells are plated in 24-well culture plates in the presence of HAT medium (Sigma) for 10-14 days. HAT slows proliferation of MC38/MUC1 and MC38, but not the fused cells. MC38/MUC1 and MC38 cells grow firmly attached to the tissue culture flask, while the fused cells are dislodged by gentle pipetting.

[1451] Flow Cytometry

[1452] Cells are washed with PBS and incubated with mAb DF3 (anti-MUC1), mAb M1/42/3.9.8 (anti-MHC class I), mAb M5/114 (anti-MHC class II), mAb 16-1OAl (anti-B7-1), mAb GL1 (anti-B7-2) or mAb 3E, (anti-ICAM-1) for 30 mm on ice. After washing with PBS, the appropriate fluorescein isothiocyanate (FITC)-conjugated anti-hamster, -rat and -mouse lgG is added for another 30 mm on ice. Samples are then washed, fixed and analyzed in a FACScan (Becton Dickinson, Mountain View, Calif.).

[1453] Fusion of SAg Transfected Tumor Cells with Dendritic Cells

[1454] Preparation of Dendritic Cells

[1455] Dendritic cells were generated from mouse bone marrow cultures of B6 mouse origin, following the protocol provided by W. Storkus, et a!. Bone marrow cells were prepared from the femurs of four 8 week old normal C576L/6 (denoted B6, H2⁶) mice.

[1456] 1. For all steps, a complete medium consisting of RPMI 1640 media supplemented with 10% heat-inactivated FCS 0.1 mM NEAA 1 mM sodium pyruvate, 50 mM 2-mercaptoethanol, 50 mM HEPES, 2 mM glutamine, 100 U/ml penicillin, and 100 U/ml streptomycin was used.

[1457] 2. Following removal of both femurs from each of four mice, cells were extruded by use of a 3 cc syringe filled with complete medium and 25 G needle. Clumps were removed by passing the cell suspension through a Cell Strainer (Falcon 2350). The cell suspension was then centrifuged at 600×g for 5 minutes at room temperature (all further centrifugations were performed in this manner unless otherwise indicated).

[1458] 3. Red blood cells were lysed by resuspending the cells in 4 ml of Red Blood Cell Lysing Solution (Sigma R7757) and incubating the tube on ice for 2 minutes. After neutralizing the ammonium chloride action with complete medium, the cells were centrifuged to pellet them.

[1459] 4. Granulocytes and leukocytes were depleted from the bone marrow cells by incubation in 2 ml of a cocktail of monoclonal antibodies from Pharmingen, formulated to contain no azide and have low endotoxin levels. The cocktail consisted of 5 mg/ml of the following monoclonal antibodies (1) 2.43, anti-CDS, Pharmingen 01050D (2) GK 15, anti-CD4, Pharmingen 094200 (3) RA3-3A1/6.1, anti-B220/CD45R, Pharmingen 01120D (4) anti GRI, Pharmingen 01210D. Antibodies were diluted in complete medium, cells were then resuspended in the cocktail and incubated for one hour on ice. After diluting the cell suspension to 30 ml with complete medium, the cells were centrifuged to pellet them.

[1460] 5. Cells were then resuspended in 12 ml of a 1:8 dilution of low endotoxin rabbit complement (Accurate Chemicals, ACL-3051) which had first been reconstituted in sterile water. The cell suspension was incubated in complement for 30 minutes in a 37° C. water bath. Cells were diluted in complete medium and washed twice by centrifugation before resuspending them in 5 ml of complete medium for counting.

[1461] 6. The cell concentration was adjusted to 3.3×10⁵ cells/ml in complete medium containing 10 ng/ml IL-4 (Sigma) and 10 ng/ml recombinant murine GM-CSF (Boehringer Mannhaim) and plated at 3 ml/well in 6 well culture plates.

[1462] 7. Cultures were refed on day 5 by removal and replacement of half the medium. This step was repeated as needed.

[1463] 8. At day 6 of culture, an aliquot of non-adherent and loosely adherent cells was collected and stained with antibody for N418 antigen (CD11c), a dendritic cell marker, using phycoerythrin (PE) labeled antibody. PE labeled antibody to an irrelevant antigen (TNP) served as the negative control.

[1464] 9. Cultures were maintained until they were used for fusion with tumor cells.

[1465] 10. Staining and FACs analysis revealed approximately 75% of the population to be CD11c positive.

[1466] Fusion of Dendritic cells with SEB Transfected B16F10 Melanoma Cells One SEB positive clone (clone 11.2) and one vector containing clone (clone 7.5) were maintained in complete medium supplemented with 50 mg/ml G418 and 0.5 mg/ml fungizone.

[1467] 1. Fusion of dendritic cells with the transtected B16F10 tumor cells, were carried out using preparations from seven and fourteen day cultures of dendritic cells.

[1468] 2. Fusion of the dendritic cells and tumor cells (either SEB transfected or control vector) was carried out at a 3:1 ratio with PEG (1450 mwt) DMSO (Sigma P7306). Mock fusion consisted of mixing dendritic cells with SEB-transfected cells in the same ratio as used for fusion without PEG-DMSO. In a secpmd experiment, fusion of the dendritic cells and the tumor cells was carried out at a 5:1 ratio.

[1469] 3. Four to 6 hours before fusion, tumor cells were cultured in complete medium (see dendritic cell preparation) supplemented with 20% FCS and 1×OPI solution (oxaloacetate, pyruvate, and insulin, Sigma). Tumor cells and dendritic cells were mixed and washed three times with serum-free medium, After removing the medium, 1 ml of PEG was added to the cell pellet while resuspending the cells by stirring for 2 min. An additional 10 ml of serum-free medium was added to the cell suspension over the next three minutes with continued stirring. The cells were centrifuged at 400×g for 5 min. and resuspended with complete medium 20% FCS. Cell suspensions were cultured in bulk cultures.

[1470] 4. In order to eliminate the melanoma cells remaining in the bulk culture, differential adherence subculturing was performed. Cultures were “fractionated” into nonadherent (transfer of the upper half the culture medium with floating cells), loosely adherent (transfer of cells resuspended by gentle pipeting), and adherent (cells requiring trypsinization to recover). Cells transferred to fresh cultures were refed with complete medium containing 20% FCS. Subculturing was performed every 2-3 days or as needed for approximately two weeks.

[1471] 5. Analysis of dendritic cell-melanoma cell fusions to detect CD11c positive cells was performed on cultures approximately 2 weeks after fusion. Cells were plated at 2×10⁴ cells/well in four well slide cultures. After three days in cultures, cells were stained with either antibody to N418 antigen (CD11c), a dendritic cell marker, using phycoerythrin (PE) labeled antibody or PE labeled antibody to an irrelevant antigen (TNP) as the negative control. After washing with PBS, the cells were incubated for 30 minutes on ice in PBS with 10% FBS and Fc-Block (Pharmingen 01241D). Five uL/well of the appropriate antibody was added to the wells and the staining was carried out by incubating the slides for 30 minutes on ice. After three washes in PBS, cells were fixed with 2% paraformaldehyde. The remaining cells were frozen for permanent storage.

### EXAMPLE 26

[1472] Transfection of Hybrid DC/tc's with SAg DNA or RNA in vivo and in vitro

[1473] Methods of transfection of SAg-encoding nucleic acid into tumor cell are disclosed in the Examples 1, 32. The same methods are used for transfection of DCs or DC/tc hybrids.

### EXAMPLE 27

[1474] Preparation of DCs which Have Phagocytosed SAg-Transfected Tumor Cell Lysates or Apoptotic Tumor Cells

[1475] PBMCs, DCs, macrophages, and T cells are prepared as follows. In brief, peripheral blood is obtained from normal donors in heparinized syringes and PBMCs are isolated by sedimentation over Ficoll-Hypaque (Amersham Pharmacia Biotech, Piscataway, N.J.). T cell-enriched and T cell-depleted fractions are prepared by rosetting with neuraminidase-treated sheep red blood cells. Immature DCs are prepared from the T cell-depleted fraction by culturing cells in the presence of GM-CSF and IL-4 for 7 d. 1,000 U/ml of GM-CSF (Immunex Corp., Seattle, Wash.) and 500-1,000 U/ml of IL-4 (Schering-Plough Corp., Kenilworth, N.J.) are added to the cultures on days 0, 2, and 4. To generate mature DCs, the cultures are transferred to fresh wells on day 7 and MCM is added for an additional 3-4 d. At day 7, >95% of the cells are CD14−, CD83−, HLA-DR^{lo} DCs. On days 10-11, 80-100% of the cells are of the mature CD14−, CD83+, HLA-DR^{hi} phenotype. FACSort® (Becton Dickinson, San Jose, Calif.) is used to generate highly pure populations of immature and mature DCs, based on their CD83− and CD83+ phenotypes, respectively. Macrophages are isolated from T cell-depleted fractions by plastic adherence for 1 h. After 24 h, cells are removed from the plates and placed in Teflon beakers for 3-9 d. T cells are further purified from the T cell-enriched fraction by removing contaminating monocytes, NK cells, and B cells.

### EXAMPLE 28

[1476] Induction of Apoptotic Death and Phagocytosis of Apoptotic Tumor Cells or SAg-Transfected Tumor Cells by DCs

[1477] Monocytes are infected with influenza virus in serum-free RPMI. These cells undergo viral-induced apoptotic death within 6-8 h. Cell death is confirmed using the Early Apoptosis Detection kit (Kayima Biomedical Co., Seattle, Wash.). As previously described, cells are stained with Annexin V-FITC (Ann V) and propidium iodide (P1). Early apoptosis is defined by Ann V+/PI staining as determined by FACScan® (Becton Dickinson). Five to eight h after infection, monocytes first externalize PS on the outer leaflet of their cell membrane, as detected with Ann V. By 8-10 h, these cells are TUNEL (Tdt-mediated dUTP-biotin nick-end labeling) positive. It is not until 24-36 h that the majority of the monocyte population included trypan blue into the cytoplasm, an indicator of secondary necrosis. HeLa cells are triggered to undergo apoptosis using a 60 UV lamp (Denna Control Inc.), calibrated to provide 2 mJ/cm²/s.

[1478] Induction and Detection of Apoptosis

[1479] Monocytes are infected with influenza virus in serum-free RPMI. Cell death is assayed using the Early Apoptosis Detection kit (Kayima Biomedical). Briefly, cells are stained with Annexin V-FITC (Ann V) and propidium iodide (P1). Early apoptosis is 14 defined by Ann V+/PI− staining as determined by FACScan (Becton Dickinson). Cells from the 293 cell line are triggered to undergo apoptosis using a 60 UVB amp (Derma Control Inc.), calibrated to provide 2 mJcm⁻²s⁻¹.

[1480] Phagocytosis of Apoptotic Cells

[1481] Monocytes and HeLa cells are dyed red using PKH26-GL (Sigma Biosciences, St. Louis, Mo.), and induced to undergo apoptosis by influenza infection and UV irradiation, respectively. After 6-8 h, allowing time for the cells to undergo apoptosis, they are cocultured with phagocytic cells that were dyed green using PKH67-GL (Sigma Biosciences), at a ratio of 1:1. Macrophages are used 3-6 d after isolation from peripheral blood; immature DCs are used on days 6-7 of culture; and mature DCs are used on days 10-11. Where direct comparison of cells is needed, cells are prepared from the same donor on different days. In blocking experiments, the immature DCs are preincubated in the presence of 50 mg/ml of various mAbs for 30 mm before the establishment of cocultures. After 451 20 mm, FACScan® analysis is performed and double positive cells were enumerated.

[1482] Coculture of DCs with Apoptotic Cells

[1483] Monocytes from HLA-A2.1-donors are infected with live or heat-inactivated influenza virus. Live influenza virus (Spafas Inc.) is added at a final concentration of 250 HAU ml-1 (MOI of 0.5) for 1 h at 37° C. Virus is heat-inactivated by treatment for 30 min at 56° C. before use. After washing, cells are added to 24-well plates in varying doses. After 1 h, contaminating non-adherent cells are removed and fresh media is added. Following a 10 h incubation at 37° C., 3.3×10³ uninfected DCs and 1×10⁶ T cells are added to the wells.

[1484] Antigen Pulsing of DC

[1485] Day 7 DC are incubated with freeze-thawed tumor lysates at a ratio of three tumor cell equivalent to one DC (i.e., 3:1) in CM. After 18 hr of incubation, DC are harvested, irradiated with rad (Gamma Cell 1000; Nordion, Kanata, Canada), washed twice in Hank's balanced salt solution (GIBCO), and in Hank's balanced salt solution.

### EXAMPLE 29

[1486] Treatment of Tumor Bearing Animals with SAg-Transfected or SAg-Expressing DCs, Accessory Cells or S/D/t Cells: Vaccination Protocols and Treatment of Established Tumor

[1487] Immunotherapy

[1488] C57BL/16 mice are immunized once with irradiated, S/D/t cells (2×10⁶ cells/mouse) 10-14 d post-immunization mice are challenged with 2×10⁷ live tumor cell subcutaneously in the scapular region. Mice are monitored on a regular basis for tumor growth and size. Mice with tumor sizes >3.5 cm were killed. All survivors were killed 40 d post-challenge.

[1489] P10.9-B16 Melanoma Model

[1490] Mice are injected intra-footpad with 2×10⁵ F10.9 cells. Legs are amputated when the local tumor in the footpad is 7-8 mm in diameter. Post-amputation mortality is less than 5%. 2 d post-amputation mice are immunized intraperitoneally with S/D/t cells followed by weekly vaccinations twice, for a total of three vaccinations. Mice are killed based on the metastatic death in the non-immunized or control groups (28-32 d post-amputation). Metastatic loads are assayed by weighing the lungs.

[1491] S/D/t cells: In Vivo Immunization and Tumor Challenge

[1492] B6 or BALB/c mice are immunized s.c. in the right flank with 1×10⁶ MCA-207 or 1×10⁶ S/D/t cells, respectively, twice at 7-day intervals. Mice then are rechallenged 7 days after the last immunization with a lethal dose of 1×10⁵ MCA-207 (for B6 mice) or 3×10⁵ MT-901 (for BALB/c mice) viable tumor cells by s.c. injections into the left flank. The size of the tumors is assessed in a blinded, coded fashion twice weekly and recorded as tumor area (in square mm) by measuring the largest perpendicular diameters with calipers. Data are reported as the average tumor area SEM (five or more mice per group).

[1493] Vaccination Protocol

[1494] B6 mice are s.c. immunized twice in a 2-wk interval with 10⁶ irradiated (15,000 rad) B16, B16 mixed with DCs (1/1: unfractionated cells from overnight culture), or S/D/t cells or recombinant formalin fixed bacteria (10⁶-10⁸). Ten days following the final immunization, each group of mice is injected s.c. with varying doses (10⁴, 10⁵, or 10⁶ cells/mouse) of viable B16. Tumor growth and survival time of each group of mice are recorded. The size of the tumor in each mouse is measured in two perpendicular dimensions with a Vernier caliper twice weekly after tumor challenge. Tumor incidence is considered positive when the average diameters of the tumor exceeded 3 mm.

[1495] In Vivo Immunization for Treatment of Pulmonary Metastases

[1496] B6 or BALB/c mice receive 1.5×10⁵ MCA-207 or 2×10⁵ MT-901 viable tumor cells, respectively, i.v. in the lateral tail vein to establish pulmonary metastases, as described. The mice then are immunized s.c. with, respectively, 1×10⁶ MCA-207 tumor lysate-pulsed S/D/t cells three times on days 3, 7, and 11 or 1×10⁶ MT-901 tumor lysate-pulsed S/D/t cells twice on days 3 and 7 after tumor injection and are killed on days 14 and 17, respectively. Pulmonary metastases are enumerated on day 15 (MCA-207) or 14 (MT-901). Data are reported as the mean number of metastases±SEM (five or more mice per group).

[1497] In vitro Activation of LN T cells

[1498] B6 mice are immunized s.c. twice in a 2-wk interval on the flanks with 2×10⁶ (10⁶/side) irradiated (15,000 rad) tumor, S/D/t cell preparation, or tumor mixed with DCs (1/1) suspended in 0.1 ml of HBSS. One week after the final immunization, inguinal LNs from each group of mice are harvested. LN cells from each group of mice are activated and expended in culture using anti-CD3 plus IL-2. In brief, LN cells (3-4×10⁶ cells/well) are activated on 24-well plates coated with anti-CD3 mAb (145-2C11) and incubated at 37° C. for 2 days. Alternatively, S/D/t cells (10⁴-10⁵/well) or exosomes (3-5 g) or recombinant bacteria (10⁶-10⁸/well) are incubated with the LN cells for 2 days and optionally with low dose IL-2 for an additional 2 days. The activated cells are suspended at 1-2×10⁵ cells/ml in CM containing IL-2 (4 U/ml) and incubated in gas-permeable culture bags (Baxter Healthcare, Deerfield, Ill.) for an additional 3 days. The derived LN T cells are harvested and used as effector cells for adoptive immunotherapy.

[1499] Adoptive Immunotherapy Models

[1500] For therapy of B16 pulmonary metastases. B6 mice are injected i.v. with 10⁵ live B16 tumor cells in 1 ml of PBS to initiate pulmonary metastases. Three days after tumor inoculation, mice are randomly divided into several groups to receive treatments by i.v. injection of 5×10⁷ cultured LN T cells suspended in 1 ml of PBS. On day 21 after tumor inoculation, mice from each group are killed, and lungs are insufflated with Fekete's solution. Lung metastases are counted. In some experiments, tumor-bearing mice are i.p. administered IL-2 (15,000 U. twice/day for 5 days) following the adoptive transfer of cultured LN T cells. For therapy of FBL-3 tumor. B6 mice are inoculated i.p. with 5×10⁶ viable FBL-3 tumor cells on day 0. By day 5, the tumor is disseminated, and mice are treated with cyclophosphamide (CY) at a dose of 180 mg/kg followed in 6 h by i.p. injection of cultured LN T cells (5×10⁷ cells/mouse) suspended in 0.5 ml of PBS. The tumor growth and the survival time of each group of mice are monitored and recorded on a regular basis.

[1501] Induction of Anti-tumor Activity by FC/MUC1

[1502] Groups of 1 mice are immunized twice at 14-day intervals by subcutaneous injection of 3×10⁵ DCs (0) or S/D/t cells represented by FC/MUC1 cells. PBS is injected as a control (0). After 14 days, mice are challenged subcutaneously with 2.5×10⁵ MC38/MUC1 cells. Tumors of 3 mm in diameter are scored as positive.

[1503] Immunization with FC/MUC1 for Prevention and Treatment of Pulmonary Metastases

[1504] Groups of 10 mice are injected twice with S/D/t cells represented by FC/MUC1 cells or PBS and then challenged after 14 days with intravenous administration of 1×10⁶ MC38/MUC1 cells. The mice are killed 28 days after challenge. Pulmonary metastases are enumerated after staining the lungs with India ink. Groups of 10 mice are injected intravenously with 1×10⁶ MC38/MUC1 or MC38 cells. The mice are immunized with 1×10⁶ S/D/t cells representing FC/MUC1 cells or FC/MC38 at 4 and 18 days after tumor challenge and then killed after an additional 10 days. Pulmonary metastases are enumerated for each mouse.

[1505] Protection Assays

[1506] C57BL/6 mice are immunized with the indicated antigen-gene construct. Animals are challenged with tumors and evaluated for tumor survival as described. Briefly, 7 days after the final immunization (day 0), immunized animals are challenged by intradermal injection in the mid-flanks bilaterally with melanoma cells (2×10⁴ ) at two times the dose lethal to 50% of the animals tested (LD50). Survival is recorded as the percentage of surviving animals. Melanoma cells for injection are washed three times in PBS. Injected cells were greater than 95% viable by trypan blue exclusion. All experiments include five mice per group and were repeated at least three times. Mice that became moribund were killed according to animal care guidelines.

### EXAMPLE 30

[1507] DNA or RNA from SAg Transfected Tumor Cells, SAg Transfected DCs and SAg Transfected DC/tc Hybrids for In Vivo Vaccination and Transfection of Naive DCs to Produce a DC Expressing SAgs and Tumor Associated Antigens Plasmid DNA Vector

[1508] 1. Genes from SAg Transfected Tumor Cells, SAg transfected DCs and S/D/t cells are cloned by PCR to contain a partial or entire coding region. In most cases, it is desirable to not include any sequence 5′ to the ATG or 3′ to the termination codon. PCR primers are designed to contain a restriction site, such as BglII or BamHI.

[1509] 2. The PCR fragments are separated from unreacted oligomers and template and then the fragment is cut with an excess of BglII for at least 5 h. The DNA is Phenol extracted and ethanol-precipitated. The purified cut fragment is resuspended in TE, pH 8.0 and ligated. to BglII-digested V1J, which has been gel-purified and dephosphorylated with calf intestinal alkaline phosphatase (CLAP), phenol-extracted, ethanol-precipitated, and resuspended in TB, pH 8.0. A 6:1 molar ratio of insert:vector in the ligation reaction is used.

[1510] 3. Competent E. coli cells (e.g., DH5, DH5a) are transformed with the ligation reaction, plated on L-ampicillin plates and grown overnight at 37° C. Colonies are screened by hybridization of plate lifts to kinase-labeled PCR primer. Several hybridization-positive colonies are selected and grown in overnight cultures for miniprep purification.

[1511] 4. Miniprep DNAs, are prepared and cut with the appropriate restriction enzymes to determine correct orientation of the gene in the vector. At least three DNAs with the gene in the correct orientation are selected to confirm by sequencing across the ligation junctions. Sequencing primers are designed from the vector sequence. Each primer is 30-50 bp from the restriction site (BglII in the example), so that 10-20 bases within the vector can be read as well as 150-200 bases within the gene. This amount of sequence verifies orientation and give a reasonable estimate of the quality of the PCR-generated gene.

[1512] 5. DNA preparations that have been sequence-verified 1/1000 in TB, pH 8.0, are diluted and use to retransform competent E. coli. Three isolated colonies from the transformation plates are grown overnight at 37° C., and used to make a −70° C. cell stock by adding 0.8 ml fresh overnight growth to 0.2 ml sterile 80% (v/v) glycerol, mixing well, and freezing on dry ice. The −70° C. stocks are used to isolate plasmid DNA from remaining cells by miniprep procedures. Miniprep DNA is cut again with the appropriate restriction enzymes, and visualized on a gel to verify the construct. All subsequent growth of cells for plasmid production are made from the −70° C. frozen stock.

[1513] All constructs are tested in vitro to validate their ability to express the desired gene product. Plasmids purified by column (Wizard preps, Promega, Madison, Wis.) or by cesium chloride banding are used to transfect tissue-culture cells transiently. Protein expression is detected by immunoblot. This check not only verifies expression but can validate the size and immunoreactivity of the gene product.

[1514] Characterization of Plasmid DNA Vectors

[1515] All constructs are tested in vitro to validate their ability to express the desired gene product. Plasmids purified by column (Wizard preps, Promega, Madison, Wis.) or by cesium chloride banding are used to transfect tissue-culture cells transiently. Protein expression is detected by immunoblot. This check not only verifies expression but can validate the size and immunoreactivity of the gene product.

[1516] Cell Growth and Transfection

[1517] 1. DC/tumor cell hybrids, at 0.8-1.5×10⁶ cells/100 mm plate in Dulbecco's Modified Eagle's Medium (DMEM) supplemented with 10% heat-inactivated fetal bovine serum, 20 mM HEPES, 4 mM L-glutamine, and 100 mg/ml each of penicillin and streptomycin, and incubate at 37° C. in 5% CO₂ for 18 h.

[1518] 2. The construct to be tested is cotransfected with 10 mg/plate and 10 g of VlJ-CAT using a calcium phosphate procedure or other methods given in Example 1.

[1519] 3. Five hours after transfection, the cells are shocked in 15% (v/v) glycerol in PBS, pH 7.2, for 2.5 mm.

[1520] 4. Cultures are harvested 72 h after transfection by washing the plates twice with 10 ml of cold PBS, pH 7.2, then adding 5 ml of cold TEN buffer and scraping.

[1521] 5. Pellet cells and use immediately or store at −70° C. for subsequent analysis.

[1522] Immunoblot Analysis

[1523] 1. Cell pellets are lysed in Single Detergent Lysis Buffer, and sonicate on ice (2-15 s bursts) to reduce viscosity.

[1524] 2. Cell debris is removed by sedimentation and determine soluble protein concentrations of the supernatants by the Bradford method.

[1525] 3. Equal loadings of soluble cell protein per lane are run on SDS-polyaciylamide gel and transfer the proteins to Immobilon P (Millipore, Bedford, Mass.) membrane.

[1526] 4. Western blots are incubated overnight with an appropriate dilution of the antibody to the gene product being tested, followed by a 1.5-h reaction with a 1:1000 dilution of peroxidase-conjugated secondary antibody. Develop blots using the ECL kit (Amersham, Arlington Heights, Ill.).

[1527] Large-Scale DNA Preparations

[1528] 1. Expression vectors are grown in E. coli strain DH5 with vigorous aeration in 500 ml growth medium/1-L shake flask. V1J constructs are grown overnight to saturation.

[1529] 2. Cells are harvested and lysed by a modification of the alkaline SDS procedure. The modification consists of increasing the volumes threefold for cell lysis and DNA extraction.

[1530] 3. DNA is purified by double banding on CsC1/ethidium bromide gradients.

[1531] 4. The ethidium bromide is removed by 1-butanol extraction, and the resulting DNA is extracted with phenol/chloroform and precipitated with ethanol.

[1532] 5. DNA in TE for transfections is resuspended and in 0.9% NaCl for injection into mice.

[1533] 6. The concentration and purity of each DNA preparation is determined by A 260/280 readings. The 260/280 ratios are >1.8.

[1534] 7. DNA is stored in small aliquots at −20° C.

### EXAMPLE 31

[1535] DNA Immunization in vivo

[1536] 1. Animals are housed in an American Association for the Accreditation of Laboratory Animal Care (AAALAC) accredited facility or other national facility and cared for in accordance with the Guide for the Care and Use of Laboratory Animals. Prior to bleeding, or administration of anesthetic or inoculation, animals are in good physical condition and free from stress.

[1537] 2. For administration of DNA vaccines, animals are anesthetized by ip injection of a solution containing ketamine and xylazine (50 and 20 mg/g body wt, respectively) in a total volume of 0.3 ml of saline. Alternatively, transiently immobilize mice for a sufficient period of time to administer an im injection by allowing inhalation of metophane. Larger animals, such as ferrets or nonhuman primates, are anesthetized using ketamine (30 mg/kg)/xylazine (2 mg/kg)/atropine (1 mg/kg) or ketamine (10 mg/kg), respectively.

[1538] 3. Fully anesthetized animals are prepared for injection by flooding and swabbing the injection site with ethanol (70%). This provides sterilization and, for small animals, such as mice, facilitates visualization of the muscle groups. To visualize small muscles further, fur around the injection site is shaved followed by ethanol swabbing, or a short incision can be made to permit direct observation of the muscle. In the latter case, the incision is sutured after inoculation.

[1539] 4. DNA vaccines are administered in saline solution alone or together with a facilitator that induces muscle generation or regeneration. Facilitators are used in animals that may not necessarily be used in humans. For mice, volumes of up to about 50 mL are injected into each quadriceps muscle using a disposable insulin syringe equipped with a 27-gauge needle and having a capacity of 0.3 ml.

[1540] 5. DNA vaccines are also administered using particle bombardment technology. Plasmid DNA is coated onto gold beads and propelled directly into tissue. Genetic immunization is accomplished by biolistic bombardment using methods similar to those recently described. Briefly, DNA-coated gold particles are prepared by combining 50 mg of 0.95 um gold beads and 100 1 of 0.1 M spermidine and sonicating for 5 s. Plasmid DNA (100 mg) and CaCl (200 ml) are added sequentially to the beads spinning in a vortex; mixer. This mixture is allowed to precipitate at room temperature for 5-10 mm. The bead preparation is then centrifuged (10,000 r.p.m. for 30 s) and washed 3 times in cold ethanol before resuspension in 7 ml of ethanol to give a final concentration of 7 mg gold per milliliter. The solution is then loaded into Tefzel tubing (Agracetus, Middleton, Wis.) and allowed to settle for 5 mm. The ethanol is removed and the beads are attached to the side of the tubing by rotation at 20 r.p.m. for 30 s and N2 dried. The dried tubing lined with beads is then cut into 0.5-inch sections and stored for use with desiccant in parafilm-sealed vials. Animals are vaccinated by delivery of two shots (each shot consisted of 0.5 m4j gold beads in 0.5 inch of tubing) to the shaved abdominal region using the Accell gene delivery device (Agracetus) at a discharge pressure of 400 p.s.i. This delivers approximately 1.00 mg/DNA per shot. Animals are immunized with various plasmids In some instances, particles, are coated with the pGREEN LANTERN-1 plasmid (Gibco BRL, Gaithersburg, Md.), which contains the “humanized” reporter gene encoding GFP from the Aequorecia victoria jellyfish. This gene encodes a naturally fluorescent protein requiring no substrates for visualization.

[1541] Formulation of DNA Vaccine

[1542] Saline is the preferred solvent. However, plasmid DNA may also be administered in various other buffer formulations and cationic lipid formulations. Facilitators include anesthetics, such as bupivacaine, and toxins, which are used in conjunction with DNA vaccines. Conventional delivery vehicles are used which facilitate internalization of DNA by cells, protect DNA from digestion by extracellular nucleases, or effect a slow release of DNA; adjuvants are coadministered to provide an additional stimulus for the immune system.

[1543] Dosage and Injection Regimen

[1544] DNA vaccines are effective across a broad dosage range. Protective efficacy is achieved with submicrogram amounts of DNA. With respect to humoral immune responses against HA, there is a direct correlation between magnitude of antibody responses and dose of DNA between 10 ng and at least 100 g. However, perhaps owing to viscosity of the solution and/or distribution of the inoculum in the muscle, administration of DNA at concentrations in excess of 2-4 mg/ml results in decreased immunogenicity with some antigens. Therefore, in mice, doses in excess of 200 g are not practical by im injection. The number of injections also directly correlates with magnitude of immune responses (up to at least three). For the influenza model in mice, we have found that three injections given at 3-wk intervals yield optimal protection. It is likely, however, that dosing and regimen will need to be optimized for each gene and challenge model.

[1545] Site of Injection

[1546] Injection of plasmid DNA into muscle cells is far superior to other cell types in their capacity to internalize DNA and/or express reporter proteins in vivo. However, immune responses also have been generated after id and iv routes of DNA injection. In addition, particle bombardment of DNA results in the transfection of dermal and epidermal cells leading to the generation of immune responses. The relative effectiveness of these different routes of delivery has yet to be tested rigorously. However, direct im injection generates a protective immune responses at doses (100 ng to 1 g) and is preferred in the range used by particle bombardment.

### EXAMPLE 32

[1547] Pulsing DCs with RNA from SAg Producing Bacteria or S/D/t Cells

[1548] Total RNA is isolated from SAg producing bacteria or S/D/t cells by standard methods. Pulsing DCs with RNA from SAg producing bacteria, S/D/t cells or SAg transfected tumor cells is performed in serum-free Opti-MEM medium (GIBCO BRL) for tumor extracts with the following modification RNA (25 g in 2501 Opti-MEM medium) and DOTAP (50 g in 250 l Opti-MEM medium) are mixed in 12×75 mm polystyrene tubes at room temperature for 20 mm. The complex is added to the DCs (25×10⁶ cells/ml) and incubated 37° C. in a water bath with occasional agitation for 25 mm. The cells are washed twice and resuspended in PBS (10 RNA pulsed DCs in 500 l PBS/mouse) for intraperitoneal immunizations. PBS, B16 extract from 10⁵ cells in PBS, or DCs prepared as described above are injected intraperitoneally in a volume of 500 l.

### EXAMPLE 33

[1549] PolyA-Cellular RNA from S/D/t cells or DCs Transfected with SAg

[1550] Preparation and Immunization Protocols

[1551] Total RNA is isolated from actively S/D/t cells given above as follows. Briefly, 10⁷ cells are lysed in 1 ml of guanidinium isothiocyanate (CT) buffer (4 M guanidinium isothiocyanate, 25 mM sodium citrate, pH 7.0; 0.5% sarcosyl, 20 mM EDTA, 0.1M 2-mercaptoethanol). Samples are vortexed followed by sequential addition of 100 l 3M sodium acetate, 1 ml water saturated phenol and 200 1 chloroform/isoamyl alcohol (49:1). Suspensions are vortexed and placed on ice for 15 mm. The tubes are centrifuged at 10,000 g, 4° C. for 20 min and the supernatant is carefully transferred to a fresh tube. An equal volume of isopropanol is added and the samples are placed at −20° C. for at least 1 h. RNA is pelleted by centrifugation as above. The pellet is resuspended in 300 l GT buffer which is then transferred to a microcentrifuge tube. RNA is re-precipitated by adding an equal volume of isopropanol and placing the tube at −20° C. for at least 1 h. Tubes are microcentrifuged at high speed at 4° C. for 20 mm. Supernatants are decanted and pellets are washed once with 70% ethanol. Pellets are allowed to dry at RT and then resuspended in TB (10 mM Tris-HCl, 1 mM EDTA, pH 7.4). Possible contaminating DNA is removed by incubating RNA in 10 mM MgCl2, 1 mM DTT and 50 U/ml RNase free DNase (Boehringer-Mannheim, Indianapolis, Ind.) for 15 min at 37° C. The solution is adjusted to 10 mM Tris, 10 mM EDTA, 0.5% SDS and 1 mg/ml Pronase (Boehringer-Mannheim) followed by incubation at 37° C. for 30 mm. Samples are extracted once with phenol-chloroform and once with chloroform, and RNA was then re-precipitated in isopropanol at −20° C. After centrifugation the pellets are washed with 70% ethanol, air dried, and resuspended in sterile water. Total RNA is quantitated by measuring OD at 260 and 280 nm. OD 260/280 ratios are typically 1.65-2.0. RNA is stored at −70° C. PolyA+ RNA is either isolated from total RNA using Oligotex (Qiagen, Chatsworth, Calif.) or directly from tissue culture cells using the Messenger RNA Isolation kit (Stratagene, La Jolla, Calif.) as per manufacturer's protocols.

[1552] Production of In vitro Transcribed RNA

[1553] The 1.9-kb EcoR1 fragment containing the coding region and 3′ un-translated region is cloned into the EcoR1 site of pGEM4Z (Promega, Madison, Wis.). Clones containing the insert in both the sense and anti-sense orientations are isolated and large scale plasmid preparations are made using Maxi Prep Kits (Qiagen). Plasmids are linearized with BamHI for use as templates for in vitro transcription. Transcription is carried out at 37° C. for 34 h using the 5P6 MEGAscript In vitro Transcription Kit (Ambion, Austin, Tex.) per manufacturer's protocol and adjusting the GTP concentration to 1.5 mM and including 6 mM m7G(5′)ppp(5′)G cap analogue (Ambion). Template DNA is digested with RNase free DNase I and RNA is recovered by phenol/chloroform and chloroform extraction followed by isopropanol precipitation. RNA is pelleted by microcentrifugation and the pellet is washed once with 70% ethanol. The pellet is air-dried and resuspended in sterile water. RNA is incubated for 30 mm at 30° C. in 20 mM Tris-HCl, pH 7.0, 50 mM KCl, 0.7 mM MnCl₂, 0.2 mM EDTA, 100 mg/ml acetylated BSA, 10% glycerol, 1 mM ATP and 5,000 U/ml yeast poly(A) polymerase (United States Biochemical, Cleveland, Ohio). The capped, polyadenylated RNA is recovered by phenol/chloroform and chloroform extraction followed by isopropanol precipitation. RNA is pelleted by microcentrifugation and the pellet is washed once with 70% ethanol. The pellet is air-dried and resuspended in sterile water. RNA is quantitated by measuring OD at 260 and 280 nm and stored at −70° C.

[1554] Pulsing of Antigen-Presenting Cells, Accessory Cells DCs Tumor Cells or DC/Tumor Cell Hybrids with RNA Derived from S/D/t Cells

[1555] Pulsing of cells with RNA is routinely performed in serum-free Opti-MEM medium (GIBCO BRL). Cells are washed twice in Opti-MEM medium. Cells are resuspended in Opti-MEM medium at 25×10 cells/nil and added to 15 ml polypropylene tubes (Falcon). The cationic lipid, DOTAP, (Boehringer Mannheim) is used to deliver RNA into cells. RNA (in 250-500 l Opti-MEM medium) and DOTAP (in 250-500 p. 1 Opti-MEM medium) are mixed in 12×75-mm polystyrene tubes at room temperature (RT) for 20 mm. The amount of polyA+ RNA or IVT RNA used is 5 g and the amount of total RNA used is 25 g. The RNA to DOTAP ratio is 1:2. The complex is added to the APC (2-5×10⁶ cells) in a total volume of 2 ml and incubated at 37° C. in a water-bath with occasional agitation for 2-4 h.

### EXAMPLE 34

[1556] In vivo Immunization with RNA Derived from “S/D/t cells” or SAg-Transfected Tumor Cells

[1557] Preparation of mRNA for Transfection

[1558] DNA is linearized downstream of the poly A tail with a 5-fold excess of PstI. The linearized DNA is then purified with two phenol/chloroform extractions, followed by two chloroform extractions. DNA is then precipitated with NaOAc (0.3M) and 2 volumes of EtOH. The pellet is resuspended at about 1 mg/ml in DEP-treated deionized water.

[1559] A transcription buffer is prepared, comprising 400 mM Tris. HCl (pH 8.0), 80 mM MgCl₂, 50 mM DTT, and 40 mM spermidine. The following materials are added in order to one volume of DEP-treated water at room temperature: 1 volume T7 transcription buffer; rATP, rCTP, and rUTP to 1 mM concentration; rGTP to 0.5 mM concentration; 7 g(5′)ppp(5′)G cap analog (New England Biolabs, Beverly, Mass.) to 0.5 mM concentration; the linearized DNA template to 0.5 mg/ml concentration; RNAsin (Promega, Madison, Wis.) to 2000 U/ml concentration; and T7 RNA polymerase (N.E. Biolabs) to 4000 U/ml concentration.

[1560] This mixture is incubated for 1 hour at 37° C. The successful transcription reaction is indicated by increasing cloudiness of the reaction mixture. Following generation of the mRNA, 2U RQ1 DNAse (Promega) per microgram of DNA template used is added and was permitted to digest the template for 15 minutes. Then, the RNA is extracted twice with chloroform/phenol and twice with chloroform. The supernatant is precipitated with 0.3M NaOAc in 2 volumes of EtOH, and the pellet isresuspended in 100 mu 1 DEP-treated deionized water per 500 l transcription product. This solution is passed over an RNAse-free Sephadex G50 column (Boehringer Mannheim #100411). The resultant mRNA is sufficiently pure to be used in transfection of vertebrates in vivo.

[1561] mRNA Vaccination in vivo

[1562] A liposomal formulation containing mRNA coding for the SAg/tumor associated antigen protein prepared and is inserted into the plasmid pXBG in A volume of 200 l of a formulation is prepared containing 200 mg/ml of S/D/t cell-derived mRNA and 500 mg/ml 1:1 DOTAP/PE in 10% sucrose is injected into the tail vein of mice 3 times in one day. At about 12 to 14 h after the last injection, a segment of muscle is removed from the injection site, and prepared as a cell lysate according to Example 7. The S/D/t cell-derived specific protein is identified in the lysate.

[1563] Severe combined imunodeficient (SCID) mice (Molecular Biology Institute, (MBI), La Jolla, Calif.) were reconstituted with adult human peripheral blood lymphocytes by injection into the peritoneal cavity according to the method of Mosier (Mosier et al., Nature 335:256 (1988)). The mice were maintained in a P3 level animal containment facility in sealed glove boxes. mRNA coding for the S/D/t cell-derived proteins is prepared by obtaining the S/D/t cell gene in the form of a plasmid removing the gene from the plasmid; inserting the gene into the pXBG plasmid for transcription; and purifying the transcription product S/D/t cell-derived mRNA. The S/D/t cells mRNA is then incorporated into a formulation and 200 1 tail vein injections of a 10% sucrose solution containing 200 mg/ml S/D/t cell RNA and 500 mg/ml 1:1 DOTAP:DOPE (in RNA/liposome complex form) were performed daily on experimental animals, while control animals were likewise injected with RNA/liposome complexes containing 200 mg/ml yeast tRNA and 500 mg/ml 1:1 DOTAP/DOPE liposomes. At 2, 4 and 8 weeks post injection, biopsy specimens are obtained from injected lymphoid organs and prepared for immunohistochemistry.

[1564] A volume of 200 l of the formulation, containing 200 mg/ml mRNA from S/D/t cells, and 500 mg/ml 1:1 DOTAP:DOPE in 10% sucrose is injected into the tail vein of the human stem cell-containing SCID mice 3 times in one day. Following immunization, the mice are challenged by tumor inoculation.

[1565] The full-length sequence for the cDNA of the S/D/t-derived gene is obtained and ligated to BgIII linkers and then digested with BgIII. The modified fragment is inserted into the BgIII site of pXBG. S/D/t-derived protein is transcribed and purified mRNA is incorporated into a formulation. Balb 3T3 mice are injected directly in the tail vein with 200 l of this formulation, containing 200 mg/ml of S/D/t-derived mRNA, and 500 mg/ml DOTAP in 10% sucrose.

### EXAMPLE 35

[1566] Preparation of “String of Beads” Tumor Antigens for Transfection of SAg-Transfected DCs, Other Accessory Cells, or Tumor Cells

[1567] Generation of rAd

[1568] All cell lines were maintained in Iscove's modified Dulbecco's medium (IMDM) (Scromed, Berlin) supplemented with 4% fetal calf serum (FlyClone), penicillin (110 international units/ml; Brocades Pharma, Leiderdorp, The Netherlands). and 2-mercaptoethanol (20 mM) at 37° C. in a 5% CO2 atmosphere. The adenoviral vector construction adapter plasmid pMad5 is derived from plasmid pMLPIO as follows. pMLPI0-lin is constructed by insertion of a synthetic DNA fragment with unique sites for the restriction endonucleases MluI, SplI, SnaBI, Spcl, Asu11, and MunI into the Hind111 site of pMLP10. Subsequently, the adenovirus BglII fragment spanning nucleotides 3328 8914 of the AdS genome is inserted into the Mun1 site of pMLP-lin. Finally, the Sal1-BamHI fragment is deleted to inactivate the tetracycline resistance gene, resulting in plasmid pMad5. A mini-gene cassette vector, pMad5-0. is generated by ligation of the annealed and phosphorylated double-stranded oligonucleotides 1a/b and 2a/b into the Mlu1 and Spe1 sites of pMad5. This cloning step leads to elimination of the original MluI and SpeI sites and to creation+ of a small ORF, which essentially consists of a start codon, the sequence (SEQ ID NO:148) SEOKLISEEDLNN, a human c-Myc-derived sequence, which is recognized by mAb 9E10 and a stop codon. A small “stuffer” sequence flanked by newly generated MluI and SpeI sites, is present between the start codon and the c-Myc sequence.

[1569] pMad5-1 and -2, each of which harbor a multi-epitope encoding minigene are constructed by unidirectional cloning of the following double-stranded oligonucleotides into pMad5-0, which had been cleaved with MluI and SpeI. pMad5-I. After each cloning step, the sequence of the inserts is verified by DNA sequencing. Expression of these minigenes is driven by the Ad5 major late promoter, which in this configuration is linked to the AdS immediate early enhancer, resulting in immediate early expression of the minigenes (SEQ ID NO:149).

[1570] rAds are generated through in vivo homologous recombination in the Ad5E1-transformed helper cell line 911 between plasmid pJMI7 containing the sequence of the AdS mutant d1309, and either of the plasmids pMad5-1 or pMad5-2. 911 cells are transfected with 10 g of plasmid pJMI7 in combination with 10 g of either pMad5-1 or pMad5-2. The rAds are plaque-purified three times, after which the clonal rAds are propagated in 911 cells, purified by double cesium chloride density gradient centrifugation, and extensively dialyzed. The presence of replication-competent adenoviruses is routinely checked by infection of Hep-G2 cells. The viral stocks were stored in aliquots with 10% glycerol at −80° C. and titered by plaque assay using 911 cells.

[1571] Further Transfection of SAg-Transfected DCs, Accessory Cells, or Tumor Cells

[1572] In short, 100 ng of plasmid DNA encoding Ad5LI, HPV 16 E7, murine p53 or the influenza-matrix protein are transfected into 1×10⁴ SAg-transfected DCs, accessory cells or tumor cells. The transfected cells are incubated in 100 ml of IMDM containing 8% fetal calf serum for 48 h at 37° C., after which 1500-5000 CTL in 25 ml of IMDM containing 50 Cetus units (=300 international units) of recombinant interleukin-2 (Cetus) are added.

[1573] After 24 h, the supernatant is collected, and its tumor necrosis factor (TNF) content is determined by measuring its cytotoxic effect on WEHI-164 clone 13 cells.

### EXAMPLE 36

[1574] Production of Exosomes from DCs Expressing SAg and Tumor Associated Antigens and Normal Hepatocytes

[1575] Exosome Isolation

[1576] SAgs or tumor associated antigens are transfected into tumor cells, DCs, or DC/tc hybrids by methods disclosed herein. The SAg-encoding nucleic acid is provided with sorting sequences which route the translated protein to the endoplasmic reticulum and thereupon to secretory vesicles or exosomes. Alternatively, tumor cells, DCs or DC/tc are incubated 18-20 hours with tumor peptides or SAgs. DCs supernatants are harvested, centrifuged (at 4° C.) at 300 g for 20 mm and then at 10,000 g for 30 min (to eliminate cell debris). Exosomes are then pelleted at 100,000 g for one hour, and washed once in a large volume of PBS (over 100-fold the final volume of resuspension of the exosomes). The protein concentrations in exosome preparations is measured by Bradford assay (BioRad). The slightly acidic pH transiently induced by the acid peptide elution increases the amounts of exosomes produced by DCs. Three to five g of exosomes are routinely obtained from 5-10×10⁵ DCs in 18-20 hours. Exosomes containing LDL, oxyLDL, apolipoproteins, LDL receptors and oxyLDL receptors are obtained from normal hepatocytes by a method similar to that described above for dendritic cells and sickled erythrocytes as in Example 6.

[1577] Mice and Tumor Cell Lines for Exosome Trials

[1578] DBA/2J (H-2^{d}) and BALB/c (H-2^{d}) female mice 6-8 weeks of age are raised in pathogen-free conditions. P815 (H-2^{d}) is a methylcholanthrene induced mastocytoma, syngeneic with DBA/2. TS/A (H-2^{d}) is a spontaneously-arising undifferentiated mammary adenocarcinoma, syngeneic with BALB/c. All tumor cell lines are maintained in RPMI 1 640 supplemented with 10% endotoxin-free fetal calf serum (Gibco BRL), 2 mM L-Glutamine, 100 U/ml penicillin, 100 mg/ml streptomycin, essential amino acids and pyruvate.

[1579] Experimental Mouse Models for Exosome Trials

[1580] Twice the minimal tumorigenic dose of tumor cells (5×10⁵ P815, 10⁵ TS/A) is inoculated intradermally in the upper right flank of DBA/2 and BALB/c mice, respectively. Animals with established tumors at days 3-4 for TS/A, or days 8-10 for P815, are immunized with a single intradermal injection of 3-5 g of exosomes per mouse in the lower ipsilateral flank. The tumor size is monitored biweekly and mice are sacrificed when bearing ulcerated or huge tumor burdens. All experiments are performed two to three times using individual treatment groups of five mice per group.

### EXAMPLE 37

[1581] Bacterial Constructs for the Expression of SAgs Linked to Galactosylceramides, α-Gal Epitope, Peptidoglycans, Lipopolysaccharides and β1,3-Glucans

[1582] Nucleic acids encoding SAgs may be transfected into bacteria which naturally synthesize and express fundamental recognition units for innate immunity. Some of these moieties such as monogalactosylceramides and a-galactosylceramides are potent immunogens and induce anti-tumor activity. The addition of the SAg and a dominant tumor associated epitope coexpressed with these natural bacterial constructs and administered to a tumor bearing host would promote a potent tumor specific response. The system described uses S. camosus as a model bacterial system to express a SAg peptide and dominant tumor epitope.

[1583] Expression Vectors for Surface Display

[1584] The shuttle vector constructed pSPPmABPXM consists of the following parts: (i) the origin of replication for E. coli and the 13-lactamase gene giving ampicillin resistance for transformed E. coli cells; (ii) the origin of replication for phage fl; (iii) the origin of replication from S. aureus and the chloramphenicol acetyltransferase gene for staphylococcus expression; (iv) the promoter, signal sequence, and propeptide sequences from the S. hyicus lipase gene construct, optimized for expression in S. camosus; (v) a multicloning site containing three unique recognition sites for restriction endonucleases; (vi) a gene fragment encoding a serum ABP from streptococcal protein G; and (vii) gene fragments encoding the cell wall-anchoring regions X and M from staphylococcal protein A.

[1585] As a model system, the surface display of SAg staphylococcal enterotoxin B. substitutes for place the 80 amino acid malaria peptide M3 from falciparum blood stage antigen Pf155/RESA. A plasmid vector, pSPPM3ABPXM is constructed, in which a gene fragment encoding SEB instead of M3 is introduced between the propeptide region and the ABP sequence of plasmid pSPPmABPXM. An oligonucleotide linker (SEQ ID NO:150) (5′AGCTTGGCTGTTCCGCCATGGCTCGAG-3′ with complementary sequence) is inserted into the HindIII site of plasmid pSZZmpISX thus creating additional NcoI and XhoI recognition sites downstream of the HindIII site in the resulting vector, pSZZmpI8XhoXM. A gene fragment encoding a 198-amino-acid ABP from the serum albumin binding region of streptococcal protein G is generated by a PCR (primers (SEQ ID NO:151) 5′-CCGAATTCAAGCTTAGATGCTCTAGCAAAAGCCAAG-3′ and (SEQ ID NO:152)

[1586] 5′-CCCCTGCAGTTAGGATCCCTCGAGAGGTAAAATTTCATC-3′ respectively) with plasmid pSPGI as template sequenced in plasmid pRIT28 by solid-phase DNA sequencing and HindIII-XhoI subcloned in frame downstream of the mp18 multilinker of pSZZmp18XhoXM, yielding plasmid pSZZmpI8ABPXM. An M3-encoding gene fragment was BamHI-HindIII subcloned from plasmid pRIT28EM3DAStop into pSZZmpI8ABPXM, yielding plasmid pSZZM3ABPXM. Plasmid pLipPS17 is constructed from pLipPS1k the introduction of a BsmI recognition site in the beginning of the lipase signal sequence, a Bc/I site at the end of the signal sequence and a BgiII site at the end of the propeptide-encoding region by site-directed in vitro mutagenesis. A gene fragment constituting almost the entire S. camosus vector pLipPSI except for a fragment encoding the C terminus of the propeptide and the majority of the mature lipase from S. hyicus is isolated by SalI-Hind III digestion and ligated to the E. Co/i plasmid pRIT28. which had previously been cut with the same restriction endonucleases. The resulting plasmid. designated pSDLip. contained the origin of replication for both E. coli and S. aureus. To restore the C-terminal region of the lipase propeptide, a gene fragment encoding the C-terminal part is generated by PCR amplification with the oligonucleotides (SEQ ID NO:153) 5-CCGAATTCTCGAGGCTCCTAAAGAAAATAC-3′ and (SEQ ID NO:154) 5′-CCAAGCTTGGATCCTGCGCAGATCTTGGTGTTGGTTTTTTG-3′ as upstream and downstream primers. respectively, with plasmid pLipPS17 as template. This amplification introduced upstream EcoRI and XhoI sites and downstream FspI. BamHI, and HindIII recognition sequences by noncomplementary sequences in the PCR primers. The gene fragment encoding the C-terminal propeptide region was EcoRI-HindIII subcloned to pRIT28 to verify a correct sequence by solid-phase DNA sequencing and thereafter XhoI-BamHI transferred to SalI-BamHI-restricted pSDLip. The resulting plasmid. pSPP is HindIII restricted, filled in with Klenow polymerase, and religated to yield plasmid pSPPDHind, which encodes the signal peptide and the complete propeptide of the S. hyicus lipase with transcription from a promoter region suitable for overproduction in S. camosus.

### EXAMPLE 38

[1587] Gene Transfer for Expression of an Mono or Digalactosylceramide by Transfection with a Cosmid Genomic Library Prepared from a Cell Line in which the Specific Glycosylceramide is Highly Expressed

[1588] The deliberate transfer of mono or digalactosylceramide expression in tumor cells is achieved by transfection with a cosmid DNA library prepared from Fabry's cells in which the mono or digalactosylceramide is highly expressed. This model demonstrates a general method for transferring glycosyltransferase genes and other factors necessary for the expression of glycosphingolipid antigens. The recipient tumor cells contain mono or digalactosylceramide and the direct precursor, lactosylceramide. The transfected cells express mono or digalactosylceramide detected both chemically and immunologically and contained human DNA detected by an Alti sequence probe.

[1589] Cells and antibodies: Fabry's cells or normal cells with an α-galactosidase deficiency and tumor cells including but not limited to neuroblastoma cells are used. Anti-galactosyl ceramide monoclonal antibody is prepared. Total DNA is prepared from Fabry's cells is excised by MboI and ligated by Bam HI-treated cosmid vector PCV 108, which has the SV40 promotor fused to the neomycin phosphotransferase gene. The target DNA for cosmid cloning is purified by gel electrophoresis between 30-40 KB size. In vitro packaging is made with an extract of lysogenic bacteria and propagated in E. coli. as described elsewhere.

[1590] Transfection and Selection of Galactosylceramide Expression

[1591] Cosmid library DNAs are transfected into various cells using the calcium phosphate DNA precipitation technique with the addition of a glycerol shock after a 6 hour incubation. Galactosylceramide selection is started 2 days later at 400 mg/ml concentration. The expression of galactosylceramide in the original Fabry's cell and the transfected tumor cells was determined by cytofluorometry (FACS II), in which FITC-conjugated anti- mono or digalactosylceramide antibody is used. Glycolipids in transfected cells are analyzed after cells were extracted in chloroform-methanol (2:1 and 1:1 v/v). The neutral glycolipid fraction is prepared by an acetylation procedure. The glycolipid profile is confirmed on HPTLC, followed by immunostaining with anti-mono or digalactosylceramide antibody.

### EXAMPLE 39

[1592] Staphylococcal Collagen Binding Adhesin Nucleic Acids Transfected into SAg Transfected Tumor Cells SAg Transfected DCs or Accessory Cells and S/D/t Cells

[1593] Collagen gene fragments from S. aureus strain FDA 574 are overexpressed in E. coli using the vector pQE-30 (QIAGEN inc. Chatworth, Calif.). Recombinant proteins expressed from this vector contain an NH2-terminal tail of six histidine residues. The gene named cna encoding a S. aureus collagen adhesin is isolated from a S. aureus genomic library cloned and sequenced. The cna gene encodes a 1185 amino acid polypeptide. The deduced amino acid sequence reveals several structural characteristics similar to previously described Gram-positive bacterial cell surface proteins.

[1594] Plasmids expressing cna gene fragments are produced as follows. Recombinant S. aureus collagen adhesin fragments are overexpressed in E. coli using three different prokaryotic expression systems. The amino terminus including the entire A domain is amplified from S. sureus FDA 574 chromosomal DNA using PCR together with primers CNA 20 and CNA 21. The amplified 1.6-kb cna gene fragment is cleaved with EcoRI and PstI, gel purified and ligated to the prokaryotic expression vector pKK223-3 obtained from Pharmacia LKB Biotechnology to create plasmid pKK1.5. Expression vector pKK223-3 contains an IPTG-inducible tac promoter adjacent to a consnesus Shine-Dalgarno ribosomal binding site. However, this vector lacks an initiation codon; therefore, the DNA to be expressed must contain an appropriate start codon. In order to express an internal cna fragment, a DNA linker sequence containing an ATG start codon is synthesized. Two partially complementary ologonucletides, JPI (SEQ ID NO:155) (5′AATTACCATGGAATTCCTGCA-3′) and JP2 (SEQ ID NO:156) (5′-TGGTACCTTAAGG-3′), are heated to 70° C. and slowly cooled to allow annealing. Once annealed, the double-stranded linker is phosphorylated by the addition of ATP and T4 polynucleotide kinase. The DNA linker contained EcoRI and PstI restriction sites at the 5′- and 3′-termini, respectively. These sites are used to insert the linker onto pKK223-3. A 2.9-kb EcoRI/PstI DNA fragment, originally isolated from lambdaGT11 clone pCOL11 was ligated to vector pKK223-3 to create plasmid pKK2.9. The collagen adhesin fragment encoded by pKK2.9 contains three repeated domains (B1, B2, and B3), the carboxyl terminus and downstream sequences.

[1595] The plamid containing the collagen adhesin is transfected into DTES by methods in Example 1 and 3 and expression of the transduced gene is monitored by Immunoblots (Example 33).

### EXAMPLE 40

[1596] Transfection of Nucleic Acids Encoding SAgs in Combination with Nucleic Acids the Promote Apoptosis Induction or Predispose to Apoptosis

[1597] SAgs expressed in apoptotic tumor cells or tumor cell/DC hybrids are ingested by DCs which present them to the immune system in more which evokes a potent immune response to the tumor associated antigens. The apoptotic cell is also one which is overexpresses a GalCer such as one with a natural or acquired a-galactosidase deficiency or from a patient with Fabry's Disease. The apoptotic stimulus can be produced by concordant influenzal infection, radiation or chemotherapy. In addition, it may be inducible by an exogenous source such as TNF if the cell is predisposed by transfection of an potent inhibitor of NF-KB such as a modified form of IkBa. Additional stimuli to apoptosis are provided by numerous well established activators (caspase 9) or initiators (caspase 8) of the caspase system or the CD95 TNFR network. Having undergone apoptosis, the SAg transfected, GalCer overproducing cell is now ingested by DCs which are cross-primed to present the tumor antigens and the GalCer in the context of SAg stimulation resulting in a potent antitumor response. Methods and protocols for SAg transfection are given in Example 1 and for prining of DCs in Example 27-28 The apoptotic transfectants are used as a preventative or therapeutic antitumor vaccine by protocols in Example 15, 16, 18-23 and 29. They are also useful ex vivo to a population of tumor specific effector T cell or NKT cells for use in the adoptive immunotherapy of cancer (Examples 2-5, 7, 15, 16, 18-23, 29).

### EXAMPLE 41

[1598] Preparation and Isolation of Glycosphingolipids and Verotoxins Galabiosylceramide, Globotrioslceramides and Globotetraosylceramide

[1599] Globotrioslceramides (GB3) and globotetraosylceramide (Gb4) are purified from human renal tissue. Briefly, the chloroform/methanol tissue extract is first applied on a Bio-Sil A (Bio-Rad) silica column in chloroform. The column is extensively washed with chloroform, and neutral glycolipids are eluted with acetone/methanol, 9:1 (vol/vol). The neutral glycolipid fraction is then applied on a second Bio-Sil A column in chloroform/methanol, 98:2 (vol/vol). Glycolipids are then resolved with a linear solvent gradient comprising equal weights of chloroform/methanol 15:1 (vol/vol), to chloroform/methanol, 4:1 (vol/vol). Galabiosylceramide (Gb2) or Gal(α1-4)Gal ceramide from marine sponge may be obtained, for example, from Dr T. Matsubara (Department of Chemistry, Kinki University, Kowakae. Japan).

[1600] VTs and Subunits

[1601] A simple method for purifying E. coli H30 verocytotoxin is as follows. The toxin, released from the cells by exposure to polymyxin B, is subjected to differential ammonium sulfate precipitation and sequential chromatography on hydroxylapatite, chromatofocussing, Cibachron blue, and Sephadex G-100 columns. The purified toxin, 39 kDa by gel filtration and having a pI of 6.72, resolves as a band which migrates at 32 kDa and another band of less than 14 kDa which migrates with the buffer front on reducing SDS-PAGE. The purified preparation is relatively heat-stable, and has a specific activity of 3×10⁹ CD50 units/mg protein in Vero sells, and LD50 values of 0.2, 9.0, and 40 g protein/kg in rabbits, rats, and mice, respectively. Antiserum to the toxin specifically neutralizes H 30 VT, Shiga toxin, and VT activity from some clinical isolates of VT⁺ E. coli but not that from a porcine edema disease strain.

[1602] Verocytotoxin 2 (VT2) is purified from E. coli strain E32511 using, as starting material, cells harvested from a Penassay broth culture incubated for 6 h at 37° C. in the presence of mitomycin C (0.2 mg/ml). A crude extract of VT2, is obtained by polymyxin B treatment of cell pellets, is purified using differential ammonium sulphate precipitation, and sequential column chromatography. The purified toxin is estimated to have a pI of 6.5 by chromatofocusing and a molecular weight of 42 kDa by gel filtration; it has a specific activity of 1.39×10⁶ CD50 units/mg protein in Vero cells, and resolves as a major band of Mr 35 kDa and another band of <14 kDa which migrates with the buffer front on reducing SDS-PAGE. The purified toxin is not neutralized by VT1 antisera, and antisera prepared to this toxin in rabbits did not neutralize VT1, but completely neutralized the activity of the homologous toxin.

[1603] Recombinant Methods of Preparing VT's and Subunits

[1604] Recombinant VT1 is purified from pJLB28. VT2 from R82. and VT2c from E32511. The recombinant E. coli strain pJLB28 is used as a source of VT1 B subunit. High yields of the toxins or subunits (10-15 mg/3 liters of broth culture) are purified by a method involving polymyxin B extraction, ultrafiltration, hydroxylapatite chromatography, chromatofocusing, and Cibacron Blue chromatography. VT2 is purified by virtually the same method from an E. coli clinical isolate, strain E32511. The cistron encoding the B subunit of E. coli Shiga-like toxin I (SLT-I) is cloned under control of the tac promoter in the expression vector pKK223-3 and the SLT-I B subunit is expressed constitutively in a wild-type background and inducbly in a lacI^{q} background. E. coli TB 1 lac pro rpsL ara thi f 80d LacZ D MI5 hsdR is obtained from Bethesda Research Laboratories (Gaithersburg, Md.). E. coli JM1O1 D lacc pro supE thi (F′ traD36 IacZ A MIS pro AB IacP) is obtained from Dr. J. D. Friesen (Department of Medical Genetics, University of Toronto, Toronto, Ontario, Canada). Plasmids pTZ18R and pKK223-3 are obtained from Pharmacia. Plasmid pJLB5 consists of a 3.0 kb Kpnl fragment of bacteriophage H 19B DNA cloned in the KpnI site of pUC18. To construct plasmid pJLB34, pJLB5 is cut at the BglII site and digested with nuclease Bal31. The ends are filled with Klenow fragment and dNTPs. The fragment remaining after deletion is cleaved with EcoRI, and the piece carrying the SLT-I B cistron is purified by agarose-gel electrophoresis. The fragment is recovered from the gel and cloned into pUC18 cut with EcoRI and HindII. The EcoR1-HindIII fragment is cloned in M13mp18 and its nucleotide sequence is determined. The B cistron coding sequence is recovered from pJLB34 as a 1.1 kb Pst1 fragment and was then cloned in the PstI fragment and was the cloned in the PstI site of the polylinker of pKK223-3. Clones with the correct orientation of insertion relative to the tac promoter are identified by restriction-endonuclease analysis. One plasmid with the orientation is selected and designated pJLB120. pJLB120 is transformed into E. coli TB1 for constitutive expression and into E. coli JM101 for inducible expression. Bacteria are grown in L-broth or brain heart infusion broth (Difco Laboratories, Detroit, Mich.) supplemented as necessary with carbenicillin at 50 mg/ml and IPTG (Bethesda Research Laboratories) at 1 mM.

[1605] Expression of Toxins

[1606] For E. coli JM 101 (pJLB 120), an overnight culture is used to inoculate fresh L-broth supplemented with carbenicillin (50 pg/ml) and was grown to mid-exponential phase (A600=0.3-0.6) at 37° C. with shaking at 300 rev./min. IPTG is added to a final concentration of 1 mM. and incubation is continued with aeration. For E. coli TB I (pJLB120), an overnight culture is used to inoculate fresh L-broth supplemented with carbenicillin (50 mg/mI), and this is grown for 12-18 h at 37° C., with shaking at 300 rev./min. In both cases the culture is harvested and the pellet is washed once with PBS (0.15M-NaCl/10 mM sodium phosphate buffer, pH 7.4) before extraction.

[1607] Polymxin B Extraction of Toxins

[1608] The washed pellet is resuspended in PBS containing 0.1 mg/ml polymyxin B in one-quarter of the original culture volume and extracted as previously described. For purification, 18 h cultures of E. Coli TBI (pJLB 120) are extracted with polymyxin B, and the extracts are concentrated 10-fold using a stirred-cell Amicon concentrator with a Ym-5 membrane (Amicon Corp., Danvers, Mass., USA).

[1609] Quantification of Toxins

[1610] Periplasmic extracts of VT-producing clones, prepared by polymyxin B extraction, are diluted as required and filtered onto nitrocellulose paper in a slot-blot apparatus (Bio-Rad Laboratories). VT is detected by using MAb 1 3C4 according to the Western-blot procedure described above. Blots are scanned with a Molecular Dynamics model 300A computing densitometer. VT is quantified by comparison with a standard curve generated with purified B subunit protein.

[1611] Purification of Toxins

[1612] The concentrated polymyxin B extract are dialysed overnight against 50 mM-Tris/HCl buffer, pH 7.4, and then applied to a DEAE-Sephacel column (1 cm×20 cm) equilibrated with 1 mM-Tris/HCL buffer, pH 7.4. Bound material is eluted by using a linear gradient of 0-1M-NaCl in 50 mM-Tris/HCl buffer, pH 7.4, and 5 ml fractions are collected. Fractions containing VT are identified, pooled and concentrated with Centriprep-3 concentrators (Amicon Corp.). This pool is dialyzed overnight against 25 mM-niidazole/HCl buffer, pH 7.4, and is applied to a column (1.5 cm×20 cm) of Polybuffer exchanger 94 (Pharmacia) equilibrated with the same buffer. Elution is carried out with a degassed solution of Polybuffer 74 (Pharmacia) diluted 1:8 with distilled water and adjusted to pH 4.0 with HCl (11 column volumes). Fractions (5 ml) are collected, and the B subunit positive fractions are pooled and concentrated with Centriprep-3 (Amicon). Ampholytes are removed by Sephadex G-50 gel-filtration.

[1613] HPLC Purification of Toxins

[1614] Approximately 1 mg (in 1 ml) of purified toxin or subunit is injected into a TSK-G2000SW HPLC gel filtration column previously equilibrated with 50 mM Tris-buffered saline (TBS), pH 7.4, flow rate of 1.0 ml/mm. Peaks, measured by absorbance at 1=280 nm, are collected.

[1615] Toxin Subunit Separation

[1616] 1 mg of toxin subunit is concentrated to 30-50 ml using a Centricon 30 concentrator (Amicon). 1 ml of a subunit dissociating solution (6 M urea, 0.1 M NaCl, 0.1 M propionic acid, pH 4, is added dropwise, and the toxin is incubated without stirring at 4° C. for 1 h. The solution is then separated by HPLC gel filtration (as above) after previous column equilibration with the dissociating solution. Peaks, measured by absorbance at 1=280 nm, are collected.

### EXAMPLE 42

[1617] Gangliosides Shed from Tumor Cells: Isolation from Tumor Cell Supernatants Collection of Tumor Cell Supernatant

[1618] Tumor cells are cultured in 25 ml of no serum-low protein medium (NSLP) in an 80 cm² flask for 1-5 days. Cells are harvested by centrifugation at 400 g for 10 mm, and the supernatant is concentrated 10-fold at 4° C. in an Amicon stirred cell with a 10-kDa cutoff ultrafilter. Concentrated supernatant and NSLP concentrated under the same conditions are stored at −20° C., and passed through a 0.1-um sterile membrane filter.

[1619] Metabolic Labeling of Gangliosides in Tumor Cell Supernatant

[1620] Tumor cells (1×10⁵/ml) are cultured in 10 ml of NSLP for 2 days. After three washes with fresh medium, cells are transferred into 10 ml of NSLP containing 1 mCi/ml D-[1-¹⁴C]GlcNH2-HCl (50 mCi/mmol (ICN Biomedicals, St. Laurent, Quebec, Canada) and 1 mCi/ml of D-[1-¹⁴C]Gal (56 mCi/mmol; Amersham) to label gangliosides. After 24 hr, cells are washed with medium three times to remove unincorporated sugars, then cultured for an additional 24-48 hr in fresh medium, before harvesting by centrifugation at 400 g. Radioactivity in the tumor cell supernatant and cells is quantitated by liquid scintillation counting. The supernatant is clarified by centrifugation at 15,000 g for 10 mm, then concentrated 10-fold using a Speedvac concentrator, before being analyzed by gel filtration chromatography.

[1621] Gel Filtration Chromatography of ¹⁴C-Labeled Tumor Cell Supernatant on Sepharose 2B-300

[1622] Concentrated ¹⁴C-labeled tumor cell supernatant is chromatographed on a Sepharose 2B-300 column (5 ml bed volume; Sigma Chemical Go, St Louis, Mo.), equilibrated with Tris-buffered saline (TBS; 50 mM Tris-HCl in 0.15 M NaCl, pH 7.4). The column is eluted at a flow rate of 0.2 ml/min at 22° C., and 200 ml fractions are collected and counted for ¹⁴C. Dipalmitoylphosphatidylcholine liposomes and sodium azide are used as standards to calibrate the void and included volume of the column, respectively.

[1623] Gel Filtration FPLC of P-Labeled Tumor Cell Supernatant on Superose

[1624] FPLC is carried out on a Superose 6 column (1×30 cm; Pharmacia, Dorval, Quebec, Canada) linked to a Gilson HPLC system and a Gilson iliB ultraviolet flow detector. The column is calibrated with a series of standard proteins of known molecular mass, ranging from β-galactosidase (465 kDa) to β-lactoglobulin (36.8 kDa) (Pharmacia, High Molecular Weight Gel Filtration Calibration kit). The void volume and included volume are determined using Blue Dextran (2000 kDa) and sodium azide, respectively. ³H-Labeled bovine brain gangliosides and [¹⁴C]Gal dissolved in NSLP or TBS are also used as standards. Concentrated YAC-1 supernatant is eluted through the column at 22° C. with TBS at a flow rate of0.5 ml/min. Fractions (0.5 ml) are collected and counted for ¹⁴C.

### EXAMPLE 43

[1625] Assessment of SAg and VT Binding to Glycosphingolipids by TLC Overlay

[1626] Glycolipids (dissolved in chloroform/methanol (2:1 v/v), are applied to a TLC plate and separated in choroform/methanol/water (65:25:4, v/v). Toxin binding is determined using known methods. Briefly, after separation of the glycolipids, the plate is air dried, incubated overnight at 37° C. in a solution of 1% (m/v) gelatin in 50 mM Tris/HCL, 150 mM NaCl, pH 7.4 (buffer A). The plate is washed in buffer A and incubated successively with VT 1 (0.07 mg/ml in buffer A) followed by monoclonal antibody PHI (1.5 mg/ml in buffer A), and finally with goat antimouse IgG horseradish peroxidase conjugate (diluted 1:2000 in buffer A). Toxin binding is visualized using 4-chloro-1-naphthol. An equivalent plate is run and treated with 3% (m/v) orcinol spray in 3 M H₂SO₄ to visualize carbohydrate and ensure equal concentrations.

[1627] Alternate Microtitre Plate Binding Assay

[1628] Quantification of toxin binding to various glycoconjugates is performed using published methods. A methanolic solution [100 pl containing glycolipid (300 nmol). phosphatidylcholine (0.5 mg) and cholesterol (0.25 mg)] is added to microplate wells and the methanol is allowed to evaporate overnight at room temperature. The wells are blocked with 2% (m/v) BSA in buffer A (200 ml/well) for 2 h at room temperature and subsequently washed once with buffer A containing 0.1% BSA (BSA/buffer A). 100 ml aliquots of dilutions of [¹²⁵I]-VT-1 in BSA/buffer A are added to the wells and incubated for 2 h at room temperature. The wells are washed five times with BSA/buffer A. excised and the radioactivity is measured in a g counter. Scatchard analysis was performed using the LIGAND program.

### EXAMPLE 44

[1629] Methods of Induction and Assessment of Apoptosis & Inhibition of Protein Synthesis

[1630] Tumor cells (5×10⁵ cells/ml) are cultivated at 37° C. in 96-well round-bottomed microtiter plates (Becton Dickinson) in 200 ml leucine-depleted RPMI (Eurobio, France) containing 1 mCi of [³H] leucine, with or without 10 ng/ml VT. After 18 hrs. cells are harvested on class fiber filters, and radioactivity incorporated in proteins measured in a scintillation counter.

[1631] Ultrastructural Analysis of VT-Treated Astrocytoma Cells

[1632] Cells are cultivated on a transferable 9 mm cylcopore membrane (0.45 mm pore size. Falcon) to form a confluent monolayer and are incubated at 37° C. with VTI (10 ng/ml). Cells are fixed at room temperature by addition of 1.6% glutaraldehyde to the wells and then incubated in 0.066 M Sorensen buffer (pH 7.4) containing 1.5% glutaraldehyde for 1 h at 4° C. After 2 h of washing with 0.1 M phosphate buffer, cells are post-fixed in 2% osmium tetroxide in the same buffer. After dehydration in graded ethanols and propylene oxide, Epon embedding, thin sectioning and uranyl-lead counterstaining on grids are performed. Thin sections are examined in a Philips EM 400 electron microscope and ultrastructural features of apoptosis are analyzed.

[1633] Flow Cytometry

[1634] Apoptosis of astrocytoma cells, incubated with 10 ng/ml of VT1 for 24-36 hrs in the presence of 10% bovine fetal serum is analyzed on an Epics Profile Analyzer (Coulter Electronics, Pathology, University of Toronto) according to known procedures. After treatment, cells are trypsinized and the 200×g centrifuged cell pellet is suspended in 1 ml of hypotonic fluorochrome solution of 50 mg/ml propidium iodide (Sigma) and stained for 30 min at 4° C. To remove RNA prior to staining, cells are treated with 100 ml of 200 mg/ml solution of DNase-free RNase A at 37° C. for 30 min. Cell cycle distribution is determined using manual gating. Flow cytrometric quantitation of apoptotic cells within the propidium iodide-stained population is performed as described. Debris and dead cells are excluded on the basis of their forward and side light-scattering properties. Astrocytoma cells grown simultaneously in the absence of VT 1 serve as controls.

[1635] DNA Fragmentation Assays Cells

[1636] Tumor cells are incubated in RPMI 1640 medium alone or in the presence of intact VT or VT-B. After 18-h culture, cells are counted and viability assessed by trypan blue exclusion. Cells are then centrifuged and washed twice with saline buffer. The pellets are lysed by incubation for 1 h at 50° C. in 10 mM EDTA, 200 mM NaCl, 0.1 mg/ml proteinase K, 0.5% (w/v) SDS, and 50 Mm Tris-HCL, pH 8. The DNA is extracted with phenol, chloroform:isoamylalcohol (24:1), and then ethanol precipitated. Unfragmented DNA is discarded, and 0.1 volume of 3 M sodium acetate, pH 7.2, is added to the supenatant which is left at −80° C. overnight. The precipitate containing fragmented DNA is centrifuged (1300 g, 30 mm) and dried under vacuum. DNA derived from 5×10⁶ cells is then resuspended in 20 ml RNAse buffer containing 0.5 mg/ml DNAse-free RNAse (Sigma), 15 mM NaCl, and 10 mM Tris-HCL, pH 7.5. and incubated at 50° C. for 1 h; Electrophoresis is carried out at 70V in 2% agarose gel containing 0.1 mg/ml ethidium bromide in a buffer containing 2 mM EDTA, 80 mM Tris-phosphate. pH 8. After electrophoresis, gels are examined under UV. Phage DNA from bacteriophage l and f digested by HindIII and HaeIII, respectively, provide molecular weight standards.

[1637] Nuclear Staining With Propidium Iodide

[1638] SF-539 cells grown on the cover slips overnight are incubated at 37° C. with VT-12B subunit (50 mg/ml) for 1.5 hrs or 10 hrs and fixed (with 1% paraformaldehyde for 3 minutes) permeabilized with 0.1% Triton X in 100 mM PBS for5 min, and stained with 5 mg/ml propidium iodide (Sigma). After extensive wash with 50 mM PBS, the fixed cells are mounted with DABCO (1,4-diazabicyclo-octane (Sigma), and nuclear staining is observed under incident UV illumination.

[1639] Proliferation Assay

[1640] Approximately 1-5×10⁴ cells are added to 24-well plates and incubated in a-MEM in 5% CO2 at 37° C. After 24 hr, the growth medium is replaced with medium containing various concentrations of the holotoxin VT1 (0.0.1.5.50, 100 ng/ml). The treated astrocytoma cell lines and endothelial cells are trypsinized and counted at intervals throughout the growth curve. Cell viability is assessed by trypan blue dye exclusion. Cell counts are plotted against time for the various concentrations of VT1 and B subunit. For each time point analyzed, the wells are set-up in triplicate.

[1641] For selected cell lines, the B subunit of VT1, VT2, and VT2c is added alone to the astrocytoma cells at same concentrations listed above. A single dose of VT1, VT2, and VT2c is added to confluent astrocytoma cells in microplate wells. Cell survival at 72 hr is monitored by staining with 0.1% crystal violet, and measuring the optical density at 590 nm using a Dynatek microtiter plate reader.

### EXAMPLE 45

[1642] Multidrug Resistant Cells: Culture and Preparation

[1643] MCF-7-wt and MCF-7-AdR (adriamycin-resistant) cells are obtained from Drs. K. H. Cowan and M. B. Goldsmith, National Cancer Institute. Cells are maintained in RPMI 1640 medium containing 10% FBS (v/v), 50 units/ml penicillin, 50 mg/ml streptomycin, and 584 mg/liter L-glutamine. KB-3-1 human oral epidermoid carcinoma cells (parent, drug-sensitive) and KB-V-1 cells (highly MDR) and subclones are obtained from the National Cancer Institute). Cells are grown in high glucose (4.5 g/liter) Dulbecco's modified Eagle's medium containing 10% FBS and other components described above. The KB-V-1 cell line is maintained with vinblastine (1.0 mg/ml) in the medium. NIH:OVCAR-3 cells (human ovarian adenocarcinoma, drug-resistant) are obtained from the American Type Culture Collection and grown in RPMI 1640 medium containing insulin (10 mg/ml), 10% PBS, and other components listed above. All cells are cultured in a humidified, 6.5% CO₂ atmosphere, tissue culture incubator. Cells are subcultured once a week using 0.05% trypsin and 0.53 mM EDTA solution.

[1644] Lipid Mass Analysis

[1645] Cell lipids are analyzed by TLC separation and charring of the chromatogram. Briefly, total cellular lipids are extracted and equal aliquots (by weight) from each sample are spotted on TLC plates. Plates are developed in the desired solvent system (see below), air-dried for 1 h, and sprayed using a 35% solution of sulfuric acid in water (v/v). The lipids are charred by heating in an oven at 180° C. for 30 mm, and resulting black bands are visualized.

[1646] Cell Radiolabeling and Analysis of Sphingolipids

[1647] MCF-7 cells grown in medium containing 10% FBS, are switched to serum-free medium containing 0.1% fatty acid-free BSA. Cell lipids are radiolabeled by incubating cells with [³H]serine (2.0 mCi/ml), [³H]palmitic acid (1.0 mCi/ml, or [³H]galactose 1.0 mCi/ml) for the indicated times. In some instances, cells are radiolabeled in medium containing 5% PBS. Cells are then rinsed twice with PBS, and 2 ml of ice-cold methanol containing 2% acetic acid is added. The cells are scraped free, transferred to glass test tubes (13×100 mm), and lipids are extracted by the addition of chloroform (2 ml) followed by water (2 ml). The resulting organic lower phase is evaporated under a stream of nitrogen. Lipids are resuspended in 100 ml of chloroform methanol (1:1, v/v) and aliquots are applied to TLC plates. When using [³H]galactose, radiolabeled cells are washed twice with PBS, transferred to glass tubes with methanol (2 ml, and glucosylceramides and gangliosides (2.5 mg of each) are added to aid recovery. Lipids are extracted by the addition of water (2 ml; and 2 ml of chloroform (three times consecutively). The pooled organic lower phase is treated as above. Lipid analysis is carried out by various TLC separations using solvent system I, chloroform/methanol/ammonium hydroxide (65:25:5, v/v); solvent system II, chloroform/methanol/ammonium hydroxide (40:10:1, v/v), solvent system III, chloroform/methanol/water (60:40:8, v/v), or solvent system IV, chloroform/methanol/acetic acid/water (50:30:7:4, v/v). For determination of ceramides, an aliquot of the chloroform-soluble lipids is base-hydrolyzed in 0.1 N KOH in methanol for 1 h at 37° C.; lipids are re-extracted and separated using solvent system V hexane/diethyl ether/formic acid (60:40:1, v/v). Galactosyl- and glucosyl-ceramides are separated using solvent system VI, chloroform/methanol/water (60:25:4, v/v). This separation is performed on TLC plates that are pre-run in 2.5% borax in methanol/water (1:1) and heated at 110° C. prior to use.

[1648] Radiochromatograms are sprayed with EN³HANCE and exposed for 3-7 days for autoradiography. TLC areas, aligned with hands on the autoradiographs or with iodine-stained commercial lipid standards are scraped from the plate. Water (0.5 ml) is added to the plate scrapings, followed by 4.5 ml of EcoLume counting fluid, and the samples are quantitated by liquid scintillation spectrometry.

[1649] Purification of Glycosylceramides

[1650] The compounds, extracted with total lipids from MCF-7-AdrR cells, are resolved from other lipids on preparative TLC using silica gel H plates developed in solvent system II. The appropriate region of the TLC plate is then scraped into test tubes, and lipids are extracted with chloroform/methanol/acetic acid/water (50:25:1:2, v/v). The samples are centrifuged, and the solvent transferred to new glass tubes and evaporated to dryness under nitrogen.

[1651] Fast-Atom Bombardment/Mass Spectrometry of TLC-isolated Lipid-

[1652] FAB/MS spectra are acquired using a VG 70 SEQ tandem hybrid instrument of EBqQ geometry (VG analytical, Altrincham, UK.). The instrument is equipped with a standard unheated VG FAB ion source and a standard saddle-field gun (Ion Tech Ltd., Middlesex, UK) that produces a beam of xenon atoms at 8 kV and 1 mA. The mass spectrometer is adjusted to a resolving power of 1000, and spectra are obtained at 8 kV using a scan speed of 10 s/decade. 2-Hydroxyethyl disulfide is used as matrix in the positive FAB/MS, and triethanolamine is used as a matrix in the negative FAB/MS. Negative FAB and positive FAB give different values for the same compounds, due to charge (proton content) differences.

### EXAMPLE 46

[1653] Incubation of Tumor Cells with Hydroxy Fatty Acids for Selective Synthesis of Galactosphingolipids and Lipid Analysis

[1654] Tumor cells on filters are incubated for 1 hr at 37° C. in the presence of labeled and unlabelled [³H]Cer(C6[D-20H]). After the incubation, lipids are extracted from the cells and the combined incubation media and analyzed Lipids are extracted from cells and media by a two-phase extraction. The upper phase contains 20 mM acetic acid and (for radiolabeled lipids) 120 mM KCl. After a chloroform wash which is added to the lower phase, lipids remaining in the upper phase GalCer are collected on SepPak C18 cartridges (Waters, Milford, Mass.) from which lipids are eluted with chloroform/methanol/water 1:22:0.1) and methanol. The organic (lower) phase is dried under N2, and the lipids are applied to TLC plates that were dipped in 2.5% boric acid in methanol, dried, and activated by heating at 110° C. for 30 mm. They are developed in two dimensions:

[1655] I. chloroform/methanol/25% NH4OH/water (65:35:4:4. v/v); and

[1656] II. chloroform/acetone/methanol, acetic acid/water (50:20:10:10:5. v/v).

[1657] Fluorescent spots are detected under UV. scraped from the TLC plates and the fluorescent lipid analogs are extracted from the silica in 2 ml chloroform/methanol/20 mM acetic acid (1:2:2:1 v/v) for 30 mm. After pelleting the silica for 10 min at 1,500 rpm fluorescence in the supernatants is quantified in a fluorimeter (Kontron. Zorich, Switzerland). Radiolabeled spots are detected by fluorography after dipping the TLC plates in 0.4% PPO in 2-methylnaphthalene with 10% xylene. Preflashed film (Kodak X-Omat S) is exposed to the TLC plates for 3 d at −80° C. The radioactive spots are scraped from the plates, and the radioactivity is quantified by liquid scintillation counting in 0.3 ml Solulyte (J. T. Baker ChemicaL Deventer, The Netherlands) and 3 ml of Ultinsa Gold (Packard Instruments. Downers Grove. Ill.).

### EXAMPLE 47

[1658] Conjugation of Proteins to Lipoproteins

[1659] The preferred method for coupling superantigens to lipoproteins is to use 10 mM solution of sodium periodate for oxidation of the carbohydrate in the lipoprotein. This will also cleave c-c bonds in the sugars with adjacent hydroxyls and oxidize them to reactive aldehydes. Superantigens form Schiff base linkages with the aldehyde modified sugar groups under alkaline conditions, the aldehyde modified sugar is then coupled to the amine containing superantigen peptide or polypeptide. The oxidation is followed by reductive amination using sodium cyanoborohydride to reduce the labile Schiff base between the aldehyde on the carbohydrate and the amine on the superantigen to form stable secondary amine covalent linkages.

[1660] An alternative procedure is to periodate oxidize the lipoprotein as above to create reactive aldehyde groups. Heterobifunctional cross-linking agent such as 4-(4-N-Maleimidophenyl)butryric acid hydrazide (MPBH) 4-(4-N-Maleimidophenyl)buryric acid hydrazide (MPBH), and 4-(N-Maleimidomethyl)cyclohexane-1-carboxyl-hydrazide (M2C2H) which contain a carbonyl-reactive hydrazide group on one end and a sulfhydryl-reactive maleimide on the other are preferred. The hydrazide reacts specifically with aldehyde functional groups to create a hydrazone linkage a type of Schiff base. To stabilize the bond between the hydrazide and aldehyde, the hydrazone is reacted with sodium cyanoborohydride to reduce the double bond and form a secure covalent linkage. The cross-bridge between the two functional ends provides a long, 17.9-A spacer. These agents couple to periodate-oxidized aldehydes on the lipoportein carbohydrate via the hydrazine and to sulfhydryl groups on the superantigen via sulfhydryl reactive maleimide group. Superantigens without reactive sulfhydryl groups are first thiolated with SATA or Trout's reagent before addition to the reactive maleide. A sulfhydryl-containing protein or molecule is is bound via the maleimide end of MPBH and the derivative purified by gel filtration to remove excess reactants, and then mixed with a lipoprotein (that had been previously oxidized to provide aldehyde residues) to effect the final conjugation.

[1661] The opposite approach e.g., modification of the glycoprotein first, purification, and subsequent mixing with a sulfhydryl-containing molecule is also acceptable. With this second option, however, the purification step should be done quickly to prevent extensive hydrolysis of the maleimide group. (See Hermanson G T Bioconjugate Techniques Academic Press, San Diego Calif., 1996)

[1662] Protocol for Periodate Oxidation

[1663] 1. Periodate-oxidize a liposome suspension containing glycolipid components according to Section 2. Adjust the concentration of total lipid to about 5 mg/ml.

[1664] 2. Dissolve the protein to be coupled in 20 mM sodium borate, 0.15 M NaCl, pH 8.4, at a concentration of at least 10 mg/ml.

[1665] 3 . Add 0.5 ml of protein solution to each milliliter of lipoprotein suspension with stirring.

[1666] 4. Incubate for 2 h at room temperature to form Schiff base interactions between the aldehydes on the lipoprotein and the amines on the protein molecules.

[1667] 5. In a fume hood, dissolve 125 mg of sodium cyanoborohydride in 1 ml water (makes a 2 M solution). This solution may be allowed to sit for 30 mm to eliminate most of the hydrogen-bubble evolution that could affect the lipoprotein suspension.

[1668] 6. Add 10 ul of the cyanoborohydride solution to each milliliter of the lipoprotein reaction.

[1669] 7. React overnight at 4° C.

[1670] 8. Remove unconjugated protein and excess cyanoborohydride by gel filtration using a column of Sephadex G-50 or G-75.

### EXAMPLE 48

[1671] Isolation of Lipoproteins

[1672] Human LDL is isolated by sequential ultracentrifugation (d 1.019-1.063 g/ml) from freshly drawn, citrated normolipidemic human plasma to which EDTA 0.1 mmol/liter is added. Freshly obtained plasma is subjected to differential ultracentrifugation to isolate the desired lipoprotein fractions. Typically, the following density fractions were isolated: 1) d<1.02. to remove VLDL and IDL; 2) d=1.02-1.05, to obtain LDL; 3) d=1.05-1.08, to obtain Lp(a); and 4) d=1.08-1.21, to obtain Lp(a) and HDL. The Lp(a)-containing density fractions were subjected to gel filtration chromatography on a Bio-Gel A-15 m column (2.5×90 cm). This column was eluted with 1.0 M NaCl, 10 mM Tris, 10 mM NaN3, 1 mM EDTA, pH 7.4, and was continuously monitored at 280 nm. The LDL- and HDL-containing density fractions are also subjected to gel filtration chromatography to remove any contaminating species and for uniformity of sample preparation. They are further dialyzed against 0.01 M sodium phosphate pH 7.4, containing 0.15 M sodium chloride and 0.01% EDTA, sterilized on 0.2-um Millipore membrane, and stored at 4° C. under nitrogen (up to 3 weeks).

[1673] Lipoprotein (a) (Lp(a))

[1674] Lp(a) is prepared from fresh human plasma by flotation centrifugation followed by affinity chromatography on lysine-Sepharose and CsCI density gradient centrifugation as described. Lipoprotein preparations are dialyzed against 0.15 M sodium chloride containing 0.01% EDTA at 0.01% sodium azide, filter sterilized (0.45 pm) and stored at 4° C. in vials filled to allow no air space. No contamination of the preparations by plasminogen is detected by either Coomassie Blue staining of sodium dodecyl sulfate (SDS) gels or by treatment with streptokinase and measuring plasmin activity with a chromogenic substrate. S2251. The sensitivities of these assays excluded plasminogen contamination of >1% and >0.4% respectively. Lp (a)-free LDL, HDL and acetylated LDL are prepared as previously described. The LDL contained no apoA-1 and the HDL contained no detectable apoB-100. The apoprotein composition is verified by SDS polyacrylamide gel elecrophoresis.

[1675] Lysine-Sepharose Chromatography

[1676] Lipoprotein (a) has an affinity for lysine-Sepharose by virtue of lysine binding kringle 4 domain(s) located on apo(a). The most important domain appears to be kringle 4₃₇, which has the greatest homology to kringle 4 of plasminogen, although there may be other kringles with lesser affinity for lysine which also contribute to the interaction of Lp(a) with lysine-Sepharose. Plasminogen and Lp(a) have similar affinities for lysineSepharose; however, Lp(a) species with different apo(a) isoforms may have affinities that are significantly greater or weaker than that of plasminogen. The buffer of choice in the isolation of plasminogen from plasma by lysine-Sepharose affinity chromatography has been 0.1 M phosphate buffer, pH 7.4. When the same buffer system is used in the chromatography of Lp(a), not all the lipoprotein is found to bind to the lysine-Sepharose i.e., approximately 80% of Lp(a) contained in the plasma had the capacity to interact with lysine-Sepharose. The percentage of Lp(a) binding to lysine-Sepharose is increased by lowering the ionic strength of the buffer medium. Lipoprotein (a) species with large apo(a) isoforms tend to self-associate in the cold therefore it is best to perform the chromatographic isolation at room temperature.

[1677] Preparation of Lysine-Sepharose 4B

[1678] Packed Sepharose 4B (250 ml) is washed with 8 liters of water on a coarse sintered glass funnel and activated with 25 g CNBr dissolved in 50 ml acetonitrile. The reaction is carried out in a well-ventilated hood, on ice, and the pH is maintained with 6 N NaOH at pH 11. After approximately 15 to 30 mm, the activated Sepharose 4B is washed with 8 liters of 0.1 M NaHCO₃ pH 8.1. The agarose is then packed by filtration, diluted with 250 ml of 0.1 M NaHCO₃ pH 8.1, containing 50 g lysine, and stirred gently overnight at 4°. The freshly conjugated lysine-Sepharose is then washed with 6 to 10 liters of 1 mM HCl followed by 8 liters of 0.1 M NaHCO3, pH 8.1, and an aliquot is saved for determination of the concentration of immobilized lysine residues using the method of Wilkie and Landry. The concentration of coupled lysine varies from 15 to 25 umol per milliliter packed gel

[1679] Chromatography

[1680] Bio-Rad (Richmond, Calif.) Econo-Pac columns (I×12 cm) are packed with 5 ml lysine-Sepharose which is preequilibrated with column buffer (e.g., 0.1 M phosphate, 0.01% NaN₂, pH 7.4). A porous polymer filter is placed on top of the lysine-Sepharose gel bed to prevent the column from running dry. Plasma samples smaller than 3 ml are applied to the column and allowed to run through by gravity at room temperature. Larger volumes (up to 50 ml) should be applied with a pump or by gravity, but at flow rates that should not exceed 20 ml/cm²/hr. The samples are washed into the column with four 0. 5-ml aliquots of column buffer to be followed with four 0.5 ml aliquots, before Lp(a) is eluted with 0.2<EACA in 10 mM phosphate, pH 7.4. One milliliter aliquots are applied at a time, and 1 ml fractions are collected in separate tubes. Liprotein(a)and plasminogen-containing fractions (tubes 4 through 10) are located by their absorbance at 280 nm. The volume of applied plasma depends on the Lp(a) content and on the sensitivity of the absorbance monitor that is part of the density gradient fractionating system.

[1681] Density Gradient Centrifugation of Lp(a)

[1682] Place 5 ml of 20% (w/w) NaBr into a SW-40 ultracentrifuge tube (ultraclear). Carefully layer the eluate from the lysine-Sepharose column (up to 8 ml) on top of the NaBr solution and, if necessary, top off the tube with 0.2 M EACA, 10 mM phosphate, pH 7.4. Place the tubes in the bucket of the swinging-bucket rotor and centrifuge 64 hr at 39,000 rpm and 20°. After centrifugation is completed, the tubes are carefully removed from the buckets and placed in the density gradient fractionating system. The tubes are pierced at the bottom, and the gradient is pushed out the top at a flow rate of 1 ml/min with a dense fluorocarbon oil, Fluorinert FC-40 (ISCO), that has a density of 1.85 g/ml. The chart speed is 1 cm/min, and the fraction collector is set to 0.5 ml/tube. The gradient is monitored at 280 nm, and the sensitivity of the chart recorder is adjusted according to the Lp(a) content of the eluate. Densities of the various fractions are measured with a density meter by established techniques.

[1683] Isolation of Apolipoproteins B48 and B-100

[1684] The following density gradient ultracentrifugation procedure for isolating subfractions of triglyceride-rich lipoproteins is suitable for SDS-PAGE on both slab and rod gels. Plasma is recovered by low speed centrifugation (1750 g, 20 min, 10). To minimize proteolytic degradation of apo B, 1.0 ul/ml plasma phenylmethylsulfonyl fluoride (PMSF, Sigma, St. Louis, Mo.), 10 mM dissolved in 2-propanol, and 5 ul/ml plasma aprotinin (Trasylol, Bayer, Leverkusen, (Germany), 1400 ug/liter, are added. Subsequently 140.4 mg solid NaCl is added per 1.0 ml plasma to increase the density to 1.10 kg/liter. Normally, a total volume of 4.0 ml of the d 1.10 kg/liter plasma is put in the bottom of a 13.4-ml polyallomer ultracentrifuge tube (Ultra-Clear, Beckman Instruments, Palo Alto, Calif.). Alternatively, 3.0 ml plasma can be mixed with 1.5 mIt) 1.42 kg/liter NaUr, from which 4.0 ml is transferred to the ubracentrifuge tube. For the rod gel method, two such tubes are required to obtain enough material from each sample. For the slab gel method, 1.0 ml plasma is sufficient. In the latter case, a 1.0 ml portion of 1.10 kg/liter plasma can be mixed with 3.0 ml of 1.10 kg/liter NaCl in the tube. A density gradient consisting of 3.0 ml each of 1.065, 1.020, and 1.006 kg/liter NaCl solutions is then sequentially layered on top of the plasma.

[1685] Ultracentrifugation is performed in a SW40 Ti swinging bucket rotor (Beckman) at 40,000 rpm and 15° (Beckman L8-55 ultracentrifuge). Consecutive runs calculated to float Svedberg flotation rate (Sf)>400 (32 min), SI 60-400 (3 hr 28 mm), and Sf 20-60 (14-hr) particles are made. After each centrifugation, the top 0.5 ml of the gradient containing the respective lipoprotein subclasses is aspirated, and 0.5 ml of density 1.006 kg/liter salt solution is used to refill the tube before the next run. The Sfl 12-20 fraction is recovered after the last ultracentrifugal run by slicing the tube 29 mm from the top after the Sf 20-60 lipoproteins have been aspirated. All salt solutions should be adjusted to pH 7.4 and contain 0.02% (w/v) NaN3 and 0.01% Na2EDTA. This method yields lipoprotein preparations almost completely devoid of plasma albumin.

### EXAMPLE 49

[1686] Preparation & Isolation of Oxidized LDL (oxyLDL

[1687] Oxidized LDL (oxyLDL)

[1688] Native LDL (200 ug protein/ml) is oxidized by exposure to 5 uM CuSO4 for 24 h at 25° C. and the degree of oxidation is assessed by the increase of mobility on 1% agarose gel (1.3-1.5 versus native LDL) and the formation of thiobarbituric acid-reactive substances (3.41+/−0.8 mmol/L). Oxidation is terminated by refrigeration. Different preparations of oxyLDL display similar electrophoretic mobilities. For comparison, commercially available preparations of native and copper-oxidized LDLs (Sigma Chemical Co., St. Louis, Mo. and Biomedical Technologies, Inc. Stoughton, Mass., respectively) are used. The level of LDL oxidation is evaluated by monitoring the formation of lipid hydroperoxides, using the FOX-2 procedure and thiobarbituric acid-reactive substances (TBARS)). The relative electrophoretic mobility is evaluated on Hydragel (Sebia, Paris, France) and the level of trinitrobenzenesulfonic acid-reactive amino groups was determined

[1689] The formation of thiobarbituric acid-reactive substances is 17.8 nanomoles of malondialdehyde/mg protein using an oxyLDL preparation with relative electrophoretic mobility of 1.4.

[1690] Methods for Measurement of Low-Density Lipoprotein Oxidation

[1691] Oxidation of LDL in vitro is accompanied by characteristic changes of chemical, physicochemical, and biological properties, and a variety of methods may therefore be used for determining the extent and/or rate of oxidation of LDL. They include measurement of the increase of thiobarbituric acid-reactive substances (TBARS), total lipid hydroperoxides defined lipid hydroperoxides, hydroxy and hydroperoxy fatty acids, conjugated dienes, oxysterols, lysophosphatides, aldehydes and fluorescent chromophores as well as measurements of the disappearance of endogenous antioxidants and polyunsaturated fatty acids, and oxygen uptake. The apolipoprotein B (apoB) becomes progressively altered during oxidation; its loss of reactive amino groups and fragmentation to smaller peptides is determined and used as an index of oxidative modification. The net increase of the negative surface charge of the whole LDL particle is analyzed as relative electrophoretic mobility (REM) by agarose gel electrophoresis. The biological assays used most frequently for assessment of the extent of oxidative modification are the rate of uptake of LDL by cultured macrophages and its cytotoxicity toward cultured cells.

[1692] Immunological assays such as enzyme-linked immunosorbent assay (ELISA) and radioimmunoassay (RIA) employing polyclonal or monoclonal antibodies recognizing certain modifications in apoB characteristic for oxidative modification are employed. The epitopes produced by covalent binding of malonaldehyde or 4-hydroxynonenal are of particular interest. Nuclear magnetic resonance (NMR), electron spin resonance (ESR), circular dichrorism (CD), and fluorescence polarization have also been applied to study certain aspects of LDL oxidation. Simple methods, such as the measure of TBARS, conjugated dienes, or fluorescence are preferred. Most characterize oxidized LDL by at least two independent measurements, for example, TBARS or REM and macrophage uptake, antioxidants and conjugated dienes.

[1693] From kinetic experiments one can conclude that both cell-mediated oxidation of LDL and oxidation in the absence of cells catalyzed by Cu²⁺ ions proceed in three consecutive time phases: lag phase, propagation phase, and decomposition phase. 1) during the lag phase the LDL becomes depleted of antioxidants, and during this period only minimal lipid peroxidation occurs in LDL, as shown by measuring polyunsaturated fatty acids (PUFAs), TBARS, lipid hydroperoxides, fluorescence, and conjugated dienes. When LDL is depleted of its antioxidants, the rate of lipid peroxidation rapidly accelerates and a lipid peroxide maximum is reached after about 70-80% of the LDL, PUFAs are oxidized. Thereafter, the peroxide content of LDL, starts to decrease again because of decomposition reactions. During the lag and propagation phases the time profile for TBARS, fluorescence at 430 nm, lipid peroxides, dienes, and REM are very similar and only after the peroxide maximum do the different indices separate and follow different kinetics. This also indicates that all the methods will give equivalent results for the susceptibility of LDL to oxidation as measured by the duration of the lag time.

[1694] Preparation of Low-Density Lipoproteins for Oxidation

[1695] Isolation of Low Density Lipoproteins

[1696] After overnight fasting blood samples are withdrawn by venipuncture and collected by free flow of blood into plastic tubes containing the appropriate volume of an aqueous solution of 10% EDTA (w/v) (disodium salt, pH 7.4) to obtain a final blood concentration of 0. 1% EDTA (wlv). EDTA serves as anticoagulant and antioxidant. Blood is centrifuged at 1000 g for 10 mm; the supernatant is then centrifuged at 10° C. and 1000 g for 5 min, followed by centrifugation at 15,000 g for 10 min. This procedure removes all cellular debris, and a completely clear plasma is obtained. Generally plasma is not stored but is used the same day for LDL. isolation. The most common method for isolation of LDL is a two-step sequential ultracentrifugation with a total run duration of about 48 hr. LDL is prepared for oxidation experiments by a single 20-hr run with a discontinuous density gradient. Plasma (up to 4 ml) adjusted with solid KBr to a density of 1.22 g/liter is layered on the bottom of a centrifuge tube (Beckman polyallomer tubes, total volume 13.2 ml) and then overlaid by KBr density solutions of 1.08 (3 ml), 1.05 (3 ml), and 1.00 g/liter (to fill the tube) containing 1 g/liter EDTA (pH 7.4). All density solutions are purged with nitrogen before use. The tubes are centrifuged in a Beckman SW 41 Ti rotor at 40,000 rpm at 10° for 20 hr. After centrifugation the main lipoproteins very low-density lipoproteins (VLDL), LDL, and high-density lipoproteins (HDL) are well separated from each other, and the LDL band characterized by the yellow color due to the endogenous b-carotene, is collected by aspiration with a syringe and transferred into a polycarbonate tube.

[1697] Next, the cholesterol content of the isolated LDL sample is determined with the CHOD-PAP enzymatic test kit (Boehringer, Mannheim, Germany). When 4 ml normolipidemic plasma is centrifuged, the final LDL stock solution harvested from the ultracentrifugation has a concentration of total cholesterol of about 1.6 to 2.2 mg/ml. Based on the known composition of LDL the total cholesterol values can be converted to LDL mass per milliliter (multiply cholesterol by the factor 3.16) or LDL protein per milliliter (multiply total cholesterol by the factor 0.63). It is also possible to determine the LDL concentration by protein measurement. Next EDTA is from the LDL stock solution and the oxidation is conducted immediately after isolation of LDL. For storage the LDL stock solution is sterile filtered through a 0.3 um filter adapted to a syringe into a sterile, evacuated glass vial and subsequently purged with nitrogen (Techne Vial, Mallinckrodt-Diagnostica, Holland, or Behring, Marburg, Germany).

[1698] Removal of EDTA

[1699] Removal of EDTA and salt from the density gradient from the LDL stock solution is conducted with prepacked columns (Econo-Pac 10DG, Bio-Rad, Richmond, Calif.) filled with Bio-Gel P6 as desalting gel. The bed volume is 10 ml with a void volume of 3.3 ml, and the total column volume is 30 ml. The gel is preconditioned by passing 20 ml phosphate-buffered saline (PBS, 10 ml sodium phosphate buffer, pH 7.4, containing 0.15 M sodium chloride) through the column.

[1700] A volume of 0.5 ml of the LDL stock solution is then applied to the column. After the LDL solution has run into the gel, 2.5 ml PBS is applied. The first 3 ml of eluate are discharged. The column is then eluted with 1 ml PBS, and 1 ml EDTA-free LDL solution is collected in a 1.5-ml Eppendorf vial. The vial is immediately made oxygen-free by nitrogen gassing and transferred to a refrigerator. An aliquot is removed to determine again the concentration by the CHOD-PAP method. The LDL solution can be rather unstable at this stage, depending on the donor, and therefore the time elapsed between desalting and the final oxidation experiment should not exceed 60 mm.

[1701] Thiobarbituric Acid-Reactive Substances as Index of Low-Density Lipoprotein Oxidation

[1702] The preferred assay in LDL oxidation studies, both in presence and absence of cells, is the determination of thiobarbituric acid (TBA)-reactive substances (TBARS) by one of the TBA assays developed for lipid peroxidation studies. The basal value of TBARS in freshly prepared LDL samples is usually low (0.5 to 3 nm/mg LDL protein) or undetectable. In LDL oxidized for about 24 hr with cells or CU²⁺ ions, the TBARS are in the range of 30 to 100 nmol/mg protein. In copper-stimulated oxidation, formation of TBARS shows a lag phase of about 40-150 min depending on the LDL, temperature, medium, and Cu2+ concentration; during this lag phase TBARS do not increase. Thereafter, TBARS rapidly increase for about 1-2 hr to a plateau value. On prolonged incubation TBARS remain more or less constant or increase slightly. The reported time course studies for TBARS in cell-mediated oxidation suggest that oxidation proceeds similarly to Cu²⁺ oxidation, with a lag phase followed by a rapid increase to a plateau level. In this context, it should be noted that most researchers only determine TBARS as an end point after about 24 hr incubation, when LDL has reached a final stage of oxidation.

[1703] Assays Used for Measurement of TBARS

[1704] Specifically, 100 ul of an LDL preparation (50 ug LDL cholesterin or 150 ug protein) is added to 1 ml of 20% trichloroacetic acid (TCA). Following precipitation, 1 ml of 1% thiobarbituric acid (TBA) is added, and the mixture is heated 45 min at 95°, cooled on ice, and centrifuged (20 min at 1000 g). TBARS are then determined by measuring the absorbance at 532 nm or the emission fluorescence at 553 nm (excitation 515 nm). Calibration is done with a malonaldehyde standard prepared from tetramethoxypropane. The second assay is typically as follows: LDL (25 ug protein) is mixed with 1.5 ml of 20% TCA and 1.5 ml of 0.67% TBA. After heating at 100° for 30 mm, TBARS are determined fluorimetrically at an emission wavelength of 553 nm with excitation at 515 nm. The sensitivity was reported to be 0.1 nmol TBARS/assay. This is equivalent to 4 nmol TBARS/mg protein. Haberland a al. determined the malonaldehyde-LDL adduct using a TBA assay. The malondialdehyde (MDA-treated LDL was precipitated with heparin-manganese, the supernatant was discharged after centrifugation, and the precipitate was washed with heparin-manganese prior to the TBA test.

[1705] Minimally modified LDL (MM-LDL) is prepared by dialyzing native LDL against 9 uM FeSO₄ in PBS for 72 h at 4° C. The electrophoretic mobility increased 1.1 to 1.2 versus native LDL. Mildly oxidized LDL was also obtained by (UV+copper/EDTA)-mediated oxidation under mild conditions: LDL solution (2 mg of apo/B/ml containing 2 umol/liter CuSO4) was irradiated for 2 h. as a thin film (5 mm) in an open beaker placed 10 cm under the UV-C source (HNS 30W OFR Osram UV-C tube, 1ₘₐₓ 254 nm, 0.5 milliwatt/cm² determined using a Scientech thermopile Model 360001), under the standard conditions. At the end of the irradiation, aliquots were taken up for analyses and oxidized LDL (200 ug of apoB/ml under standard conditions or at the indicated concentration) were immediately incorporated in the culture medium.

[1706] Acetylation of LDL is performed with excess acetic anhydride. Endotoxin contamination in oxyLDL is measured with the coagulation Limulas amebocyte lysate assay using a commercially available kit (E-TOXATE, Sigma Chemical Co.).

[1707] Induction of Apoptosis by oxyLDL

[1708] Incubation of HUVEC with oxLDL for 18 hours induced DNA fragmentation in a concentration-dependent manner with maximal effects at 10 ug/mL. In contrast, native LDL did not induce apoptosis in the concentration range tested. The induction of apoptosis by oxyLDL is confirmed by demonstrating DNA fragmentation through agarose gel electrophoresis. LDH release did not increase_{—}10 ug/mL oxLDL (105±11% compared with control cells) excluding the induction of necrosis.

[1709] Detection of Fas and FasL Expression on Endothelial Cells

[1710] 90% confluent HAECs and HUVECs were incubated with oxyLDL (150 ug protein/ml) or L-a-palmitoyl lysophosphatidyleholine (LPC, 45 uM, Sigma Chemical Co.) at 37° C., 5% CO2 for 13 h, and detached from the culture plate with 0.5% EDTA. To determine FasL expression, endothelial cells are incubated with an anti-FasL antibody (C-20, Santa Cruz Biotechnology, Santa Cruz, Calif.) or with rabbit IgG followed by a FITC-conjugated antibody against rabbit Ig (Biosource, Camarillo, Calif.). To determine Fas expression, endothelial cells were incubated with an FITC-conjugated anti-Fas monoclonal antibody (clone UBZ. Immunotech. Wemtbrook. Me.) or an FITC.conjugated mouse IgG. Immunofluorescence staining was analyzed by FACS (fluorescence-activated cell sorter) (Becton Dickinson, Mountain View, Calif.).

[1711] Detection of DNA Fragmentation by Agarose Gel Electrophoresis

[1712] HUVECs (10⁶ ) were incubated in the presence or absence of native LDL (300 ug protein/ml). oxyLDL (300 ug protein/ml). LPS (100 endotoxin U/ml), or a neutralizing anti-FasL antibody (i0 ug/ml, 4H9, MBL, Nagoya. Japan) for 36 h. Attached cells and floating cells were combined and lysed in 0.33 ml of lysis buffer (10 mM Tris-HCi. pH 8.0, 1 mM EDTA, 0.2% Triton X-100) followed by incubation with 0.1 mg/ml RNAase A for 1 h at 37° C. and 0.2 mg/mi proteinase K for 3 h at 50° C. Ethanol-precipitated DNA was resuspended in TE buffer, fractionated on 1.5% agarose gel in IX TBE buffer, and stained with ethidium bromide.

[1713] Detection of DNA Fragmentation by TdT-mediated dUTP Nick-end Labeling (TUNEL)

[1714] 70% confluent HUVECs are incubated in the presence or absence of OxLDL (300 ug protein/ml), a neutralizing anti-FasL antibody (10 ug/mi, 4H9). or an agonistic anti-Fas antibody (0.5 ug/ml CH11, MBL) for 16 h at 37° C., 5% CO₂. Attached cells harvested by trypsinization and floating cells are combined, fixed in 4% paraformaidehyde, permeabilized in 0.1% Triton X-100, 0.1% sodium citrate, and incubated with TUNEL solution (Boehringer Mannheim, Indianapolis, Ind.) in the absence or in the presence of terminal deoxynucleotidyl transferase. After washing in PBS, fluorescence intensity was analyzed by FACS.

[1715] Cell Viability Assay

[1716] HAECs or HUVECs are cultured in a 96-well plate at 80% confluency and incubated in the presence or absence of oxyLDL (300 ug protein/ml), LPC-C16:0 (55 uM). a neutralizing anti-FasL antibody (10 ug/ml, 4H9), or an agonistic anti-Fas antibody (0.5 ug/ml. CH11) for 18 h. Cell viability is measured by means of MTT (dimethyithiazol-diphenyltetrazolium bromide) assay and percentage of cell death was calculated as 100×(1-viability of treated endothelial cells/viability of untreated endothelial cells).

[1717] Cell Viability Assay and Reagents—Human umbilical vein endothelial cells (HUVECs) are isolated and cultured in endotheial growth medium (SCM; Clonetics, San Diego, Calif.). HUVECs cultured in a 96-well plate at 80% confluency are incubated with oyxLDL or LPC at indicated doses for 16 h. Cell viability is measured by means of MTT (3-(4,5-dimethyl thiazol-2-yl)-2,5-diphenyl tetrazolium bromide) assay.

### EXAMPLE 50

[1718] Preparation of Vesicles Expressing Recombinant Membrane Bound Superantigens Using the Yeast sec6 Mutant

[1719] The superantigen cDNA, or oxyLDL receptor, apoprotein verotoxin or other polypeptide given herein corresponding to the cDNA for protein expression in yeast is used. The length of the 5′-untranslated region is minimized. Expression of a cDNA in the sec6-4 yeast mutant is best controlled and may be maximized with an inducible promoter. The GAL1 promoter is preferred. The pYES2 expression vector (InVitrogen, San Diego, Calif.) contains the GALI promoter followed by a multiple cloning site. Other commonly used inducible promoters include the metallothionein CUPI promoter, which is tightly controlled by copper; promoters activated in response to heat shock, which are of particular interest for expression in the temperature-sensitive sec6-4 mutant and the PH05 promoter, which is derepressed at low phosphate concentrations. Introduction of the plasmid into yeast cells is accomplished either by electroporation or LiCi-mediated transformation. Isolation of transformants requires selection yeast that are ura3 auxotrophs are able to grow on media lacking uracil when they contain the pYES2 expression vector that contains the wild-type URA3 gene. Other selectable markers include enzymes in the adenine, histidine, leucine, lysine, and tryptophan biosynthetic pathways. The superantigen cDNAs are cloned into the pYES2 expression vector and selected for transformants on plates with synthetic complete (SC) medium lacking uracil but containing 2% raffinose as the carbon source (SC-Ura raff medium). Single colonies are isolated and grown overnight to saturation in 2 ml of SC-Ura raff medium at 25° with constant shaking in 2% raffinose instead of glucose. In a subsequent step the yeast are switched to medium containing galactose as the carbon source as the GAL1 promoter initiates gene expression only when galactose is the predominant carbon source. The 2-ml starter culture in SC-Ura raff medium is added to a 1-liter culture of the same growth medium and incubated at 25° with constant shaking. When these cultures reach an OD600 (optical density at a wavelength of 600 nm) of about 1.0 (usually about 12 hr), the cultures are centrifuged at 4000 g at 4° for 5 min, resuspended in 4 liters of SC-Ura gal induction medium (containing 2% galactose instead of 2% raffinose as the carbon source), and shifted to 37° for 2-3 hr to induce protein expression in the sec6 vesicles.

[1720] Following growth at 37°, the cells are collected by centrifugation at 4000 g at 40 for 5 mm and washed once in ice-cold water. Pellets are resuspended in an absolute minimum volume of water and quick frozen in liquid nitrogen. Cultures may then be stored indefinitely at −70°. Thawed cultures are resuspended to a final concentration of 50 OD618˜units/ml (e.g., a 1-liter culture at OD600=1.0 is resuspended in 20 ml) in 10 mM dithiothreitol (DTF) and 100 mM Tris-CI, pH 9.4. The resuspended culture is shaken gently at room temperature for 10 min. This step increases the efficiency of spheroplast lysis at a later step by reducing disulfide bonds in the yeast cell wall. We then collect the cells by centrifugation at 4000 g at 4° for 5 mm and resuspend them in spheroplast buffer to a final concentration of 50 OD600 units/ml. Spheroplast buffer consists of 1.4 M sorbitol, 50 mM K2HPO4, pH 7.5, 10 mM NaN3, and 40 mM 2-mercaptoethanol. Spheroplasts are generated by digesting the cell wall with lyticase (or zymolyase) for 45 min at 37°, The amount of bacterially expressed, recombinant lyticase needed to form spheroplasts is determined empirically; after 45 min the OD₆₀₀ of a 10-ul aliquot of the yeast suspension diluted into 1 ml of 0.1% sodium dodecyl sulfate (SDS) should be 20% of the OD₆₀₀ of the the initial dilution measured at 0 min The spheroplasts are then harvested at 3000 g for 5 min at 4°, and the cells are resuspended gently with a pipette or Teflon rod in spheroplast buffer containing 10 mM MnCl₂ to a final concentration of 50 OD₆₀₀ units/ml. Concanavalin A (Sigma, St. Louis, Mo.) is then added to a final concentration of 0.78 to 1.25 mg/ml and incubated with rotation or gentle shaking at 4° for 15-30 mm. A concanavalin A stock solution (25 mg/ml) is prepared in spheroplast buffer containing 1 mM MnCl2 and 1 mM CaCl₂ and is frozen in 1-mi aliquots. Lectin-coated spheroplasts are harvested at 3000 g for 5 mm at 4° and then resuspended in lysis buffer to a final concentration of 60-70 OD₆₀₀ units/mi. The suspension is homogenized using the loose pestle of a Dounce homogenizer and 30-40 strokes of the pestle at 40 (or on ice). Lysis bufferconsists of 0.8 M sorbitol, 10 mM triethanolamine (TEA), and 1 mM EDTA. The pH is adjusted to 7.2 with acetic acid or TEA.

[1721] Unlysed cells, cell debris, mitochondria, and nuclei are pelleted at 20,000 g for 10 min at 4° C. The supernatant is removed with a pipette and centrifuged at 144,000 g for 1 hr at 40 to pellet the secretory vesicles. The supernatant is decanted carefully and the pellet is resuspended in either lysis buffer or another buffer containing osmotic support.

### EXAMPLE 51

[1722] Use of Antisense Oligonucleotides to Inactivate ITIMS In Vitro and In Vivo

[1723] Antisense agents inhibit specific gene expression by exploiting hybridization of complementary nucleic acids, resulting in decreased mRNA stability, or through blocking mRNA processing, transport or translation. An RNA or single stranded DNA molecule that is complementary to the mRNA of ITIM is introduced into cells in vitro. The antisense molecule forms base-pairs with the mRNA, thus blocks some essential step in translation.

[1724] Antisense oligonucleotides can be delivered by plasmids or as small single-stranded oligonucleotides. Modifications of these strategies, include inducible antisense vectors, antisense retroviral vectors, and a variety of oligonucleotide modifications to facilitate delivery and enhance efficacy are known in the art.

[1725] Expression vectors are constructed to produce high levels of antisense RNA in transfected cells. Antisense nucleic acids can be introduced into cells of the immune system using synthetic single-stranded DNA oligonucleotides. When short oligonucleotides are complementary to the sequence around the translational initiation site (the AUG codon) of mRNA in the cells, they hybridize to the mRNA and prevent initiation of translation. Chemically modifying the oligonucleotides can greatly increase the efficiency with which they enter cells and their stability once inside.

[1726] Principle of the Method

[1727] Genetically engineered plasmid-based antisense methods, expression vectors which generate RNAs containing sequences complementary to key regions of specific genes are used. These antisense expression vectors include prokaryotic or eukaryotic selectable markers that allow identification of transfectants, a promoter that controls the expression of the antisense RNA, an antisense sequence which is complementary to a bindable region in the target gene sequence (5′ untranslated region and/or translation initiation regions preferred); and a stabilizing sequences to assure stability of the antisense RNA product. Optimal gene replacement protocols include both inhibition of the endogenous gene and overexpression of a selected gene. Oligonucleotide-based antisense methods use synthetic single-stranded oligonucleotides which may range from simple deoxyribonucleotides to more complex molecules containing base modifications and/or covalent modifications which enhance delivery, uptake or antisense effect.

[1728] Materials and Reagents

[1729] Antisense expression vectors are obtained from the laboratories where they were developed or are constructed by combining the key elements described above. These include neomycin as a selectable marker so transfectants can be isolated employing Dulbecco's modified Eagle's medium with 10% calf serum and the appropriate concentration of the antibiotic G418 (Bethesda Research Laboratories. Bethesda, Md.). G418 permits selection of stable transformants.

[1730] Pure oligonucleotide preparations and nuclease-free culture conditions are utilized. Antisense oligonucleotides are synthesized by solid state methods and purified by chromatography or gel purification (or obtained from commercial sources). Following purification, the oligonucleotides are lyophilized two to five times in sterile distilled water to remove volatile components. Both unmodified and modified oligonucleotides are suspended in 10 mM HEPES (N-2-hydroxyethylpiperazine-N′-2-ethanesulfonic acid)-buffered saline at pH 7.4. The pH of these oligonucleotide solutions is checked to avoid the toxicity of nonphysiologic pH. Nuclease-free culture conditions are employed.

[1731] Design and Construction of Antisense Expression Vectors

[1732] For inhibition of ITIM expression in mammalian cells, a prototype antisense expression vector is used that allows cloning of antisense and control “sense” gene fragments between the metal-inducible metallothionein promoter and β-globin sequences which are added to provide stability to the antisense sequences. We have also constructed vectors which differ only in the promoter region because this region is readily excised by 5′EcoRI and 3′ HindIII sites. One series of vectors is regulated by the steroid-inducible mouse mammary tumor virus (MMTV) promoter, and another series of vectors is regulated by the constitutive Rous sarcoma virus LTR. Antisense retroviral vectors are constructed which are compatible with the plasmid expression vectors: the promoter cartridge is flanked by unique 5′ XhoI and 3′ HindIl sites, and the antisense cartridge is flanked by unique 5′ HindIII and 3′ BamHI sites. Because the target sequence for the 84-bp antisense vector resides entirely within the 5′-untranslated region, this antisense vector inhibits the endogenous ITIM gene.

[1733] Antisense-resistant expression vectors are constructed by cloning the HaeII-EcoRI fragment of human ITIM cDNA into a Moloney LTR-regulated expression vector removing sequences complementary to the 84-bp antisense ITIM construct. In order to demonstrate which domains of the ITIM gene contribute to cellular inhibition, ITIM C-terminal deletion mutants are constructed by linker insertion of an in-frame termination codon. All of these mutant ITIM plasmids are subcloned into expression vectors for expression in cultured fibroblasts (Moloney-LTR promoter) or F9 embryonal carcinoma cells (Rous sarcoma virus LTR promoter). xxxxx

[1734] Production of Stable Transformants Expressing Antisense RNA

[1735] Stable transformants expressing both the antisense-resistant vector and the anti-ITIM RNA construct are obtained by cotransfection of both plasmids using the following protocol which generally results in 20-50 transformants per 20-50 mm² tissue culture dish.

[1736] Day 1. 1.2 million cultured mouse fibroblasts (NIH 3T3, BALBc/3T3) are plated per 100-mm² tissue culture plates in 10 ml of Dulbecco's minimal Eagle's medium supplemented with 10% calf serum and allowed cells to attach overnight.

[1737] Day 2. Each plate is transfected by calcium-DNA coprecipitation with 20 mg of cesium-banded plasmid DNA. For cotransfection studies, use 2 mg of the antisense vector containing the Neo selectable marker and 18 mg of the antisense-resistant expression vector which lacks this selectable marker. This results in expression of both plasmids in most stable transformants. A DNA-calcium solution is prepared by mixing in the following order: 20 mg of plasmid DNA dissolved in TE (10 mM Tris, pH 7.5. 1 mM EDTA), 50 ml of 2.5 M CaCl₂ and TE to make 500 ml total. This solution is added slowly to 500 ml of 40 mM HEPES-buffered saline (pH 7.2) and is then mixed by bubble aeration to form an opalescent solution. After a 30-mm incubation at 25°, the entire 1-ml coprecipitate is added to the plate. After incubating the DNA coprecipitate with the cells for 4 hr. the media is aspirated, and the cells are treated with 5% glycerol in 20 mM HEPES buffer for 3 min. After this glycerol shock, the cells are washed again with phosphate-buffered saline (PBS) and then refed with 10 ml of fresh medium containing serum.

[1738] Day 3. The media is aspirated and replaced with 10 ml of Dulbecco's minimal Eagle's medium supplemented with 10% calf serum and 1 mg/ml of the antibiotic G418.

[1739] Day 5. The medium is aspirated (which by this time contains dead cells and cellular debris from G418-sensitive cells) and refed with 10 ml of Dulbecco's minimal Eagle's medium supplemented with 10% calf serum and 1 mg/ml of the antibiotic G418.

[1740] Day 7. The medium is aspirated and refed with 10 ml of Dulbecco's minimal Eagle's medium supplemented with 10% calf serum and 1 mg/ml of the antibiotic G418.

[1741] Days 9-12. Once individual clones are clearly apparent they can be isolated with cloning rings and expanded in individual wells of microtiter plates. Multiple clones should be studied for each combination of antisense vector and antisense-resistant rescue plasmid. Cotransfectant clones are analyzed to quantitate the extent of antisense inhibition of the ITIM gene, the level of expression of the antisense-resistant transfected gene, and the effect of target gene inhibition on cellular reactivity to lipid antigens or SAgs presented alone or in the context of cell bound or soluble MHC or CD1 molecules.

[1742] Assays to quantitate reactivity and analyze antisense inhibition in the presence and absence of antisense RNA are carried out as follows: [³H]Thymidine incorporation of stable transfectants and controls is measured after exposure to lipid antigens or SAgs in the context of MHC or CD1 either cell bound (or immobilized) or in soluble form. Control “sense” plasmids are similarly treated and tested. In addition, rescue with a wild-type antisense-resistant gene should overcome the antisense inhibition, provide additional assurance that the growth inhibition is actually due to specific inhibition of the ITIM gene.

[1743] Antisense inhibition is quantitated by measuring levels of either target gene m RNA or protein. Nuclease protection assays provide an excellent method for quantitation of antisense effect. Cells from the stable transformant clones are placed in DMEM with 0.5% calf serum for 48 hr prior to steroid treatment and/or serum restimulation. RNA is isolated from cells by the guanidinium thiocyanate method and the total RNA from 2×10⁶ cells is hybridized with 3×10⁶ cpm of the labeled RNA probe for 16 hr at 45°. Samples are then treated with 2 mg/ml of RNase A and 4 U/ml of RNase T1 for 30 min at 25° and are deproteinized by sequential treatment with proteinase K and phenol-chloroform followed by ethanol precipitation, and electrophoresis on an 8% denaturing polyacrylamide gel.

[1744] Antisense Inhibition with Anti-ITIM Oligonucleotides

[1745] Oligonucleotides target regions of the ITIM mRNA or SLAP RNA which are available for hybridization i.e., a region that is unbound by protein and free of secondary structure. Sequences within the 5′-untranslated region or translation initiation region are employed for design of antisense oligonucleotides. The length of oligonucleotides employed for antisense inhibition varies between 12 and 20 nucleotides. A melting temperature™ of 50-55° is optimal for specific inhibition of target genes. Tm for short oligonucleotides is best determined by a formula in which G and C residues equal 40 and A and T residues equal 20. Optimal ITIM antisense oligonucleotides range from 14 to 19 nucleotides.

[1746] Determination of Oligonucleotide Stability

[1747] Oligonucleotides are 5′ end labeled with polynucleotide kinase and [³²P]ATP and are then added to culture media and serum (plus unlabeled oligonucleotide to achieve a final oligonucleotide concentration of 5 mM: for a 15-mer this is approximately 20 mg/ml). Aliquots are removed periodically and resolved on denaturing 20% acrylamide gels.

[1748] Detection of Intracellular Duplexes

[1749] To detect intracellular duplex, 20 mg of oligonucleotide is 5′ end labeled oligonucleotides with 20 mCi of [³²P]ATP to achieve a specific activity of 50 million cpm/mg. After incubation for 4 hr. unincorporated oligonucleotides are removed by washing the cells three times with HEPES-buffered saline prewarmed to 37° (to prevent the melting of duplexes). The cells are then lysed in 100 ml of Nonidet P-40 lysis buffer (10 mM Tris, pH 7.5. 10 mM NaCl, 3 mM MgCl₂, 0.05% Nonidet P-4t)) containing 0.5% sodium dodecyl sulfate, 100 mg of proteinase K per ml, and a 10,000-fold excess of unlabeled oligomer (as the carrier). Following phenol/chloroform extraction and ethanol precipitation. a S1 nuclease protection assay is performed at 37° and the products are analyzed on a 20% denaturing acrylamide gel (containing 42 g of urea of 100 ml). To demonstrate that the duplex is intracellular and not an artifact of RNA isolation, an “add-back” control is performed in which the measured amount of cell-associated radioactivity is added with carrier (excess unlabeled oligonucleotide) to a lysate of cells that were previously unexposed to oligonucleotide.

[1750] To confirm that antisense oligonucleotide effects are due entirely to target gene inhibition, and not merely toxicity due to unexpected effects of double-stranded RNA, reversal experiments are performed employing an excess of anticomplementary (“sense”) oligonucleotide. If an effect is due to hybridization of antisense oligonucleotide sequences to specific gene target sequences, then addition of an excess of sense oligonucleotide reverses the observed effects on cell growth or gene expression but expression of the antisense rescue gene restores the ITIM function. This provides a useful specificity control for the antisense RNA and suggests that the observed results are due to inhibition of endogenous gene expression.

[1751] Oligonucleotide preparations can have toxic effects on cells, thus anti-sense oligonucleotide these experiments employ multiple controls to assure that the observed results are not merely due to toxicity. First, the target gene is shown to be inhibited by analyzing levels of mRNA and/or protein. Secondly, the demonstration that oligonucleotides with sufficient sequence dyshomology are able to prohibit duplex formation and third that the addition of an anticomplementary oligonucleotide can reverse the antisense oligonucleotide effects by hybridization competition.

### EXAMPLE 52

[1752] ITIM & SLAP Gene Knockout Mice

[1753] Gene Targeting and Generation of Mutant Mice

[1754] Nucleic acids encoding the ITIM of the IR_{TAA}, IR_{IDA} and IR_{SAg} and SLAP are deleted in vitro using homologous recombination and insertional mutagenesis. With this approach, mice are produced that have mutations in any gene for which one has a cDNA or genomic clone. Stable cultured lines of totipotent cells, such as from mouse embryos or ES (ES) cell lines, grown and manipulated in tissue culture are introduced into blastocyst-stage mouse embryos and can participate in the development of all tissues of the embryo, including the germ line. ES cells genetically altered in culture (e.g., whether by addition or mutation of genes) are used to produce strains or lines of mice that carry and transmit this genetic alteration. Cells which have undergone homologous recombination are rendered positively selectable by introduction of a marker gene that can be inserted into any cloned DNA molecule. Negatively selectable markers are introduced at one end of the transfecting DNA molecule to allow selection against random insertions in parallel with the selection for the positively selectable marker. With these and other technical advances it is now feasible to mutate a cloned ITIM gene by site-specific mutagenesis in ES cells and thereby generate a an inbred mouse line with the desired mutation and functional deficiency.

[1755] Gene Targeting Vectors

[1756] Homologous recombination frequency is higher when the gene targeting vector is isogenic with the ES cells and also increases markedly with increasing sequence homology. With this in mind, genomic clones are isolated that contain 3-5 kb of sequence homology on each side of the intended ITIM or SLAP mutation (except for the case wherein PCR is used to screen for homologous recombination).

[1757] To make an ITIM or SLAP knockout or null mutation, a deletion is made in the ITIM gene, followed by insertion of a positive selectable marker. Insertion alone is more likely to allow some expression of the gene by aberrant transcription and/or translation. The ITIM or SLAP mutation is made near the 5′ end of the gene and includes deletion of some of the sequence encoding the mature protein. An effective strategy is to delete the ATG start codon and the signal sequence if they fall in a single exon. If the transcription start site is known, this is also deleted. Such deletion of control elements for transcription, translation and secretion increases the probabilitty that expression of the desired protein will be completely ablated. The positive selectable marker is then inserted in place of the deleted segment.

[1758] The positive selectable marker is one that confers antibiotic resistance (to G418, hygromycin B or an equivalent antibiotic) by replacing the bacterial control sequences of the neomycin resistance (neo) or hygromycin resistance (hyg) genes, respectively, with eukaryotic control sequences. Both markers are expressed at many loci in ES cells when controlled by the mouse phosphoglycerate kinase (PGK) promoter and polyadenylation signal. The engineered pMCI promoter of the gene encoding hypoxanthine-guanine phosphoribosyltransferase (HGPRT) is also used successfully in ES cells for gene targeting.

[1759] To promote targeted versus random integration of the targeting vector, a positive/negative selection procedure is used which utilizes a negative selectable marker at one or both ends of the targeting vector. The negative marker is lost during homologous recombination but retained during random integration. The negative selectable marker utilized is the herpes simplex virus thymidine kinase gene (HSV-TK), which renders cells sensitive to ganciclovir. HSV-TK works well under control of either the pMCI or the PGK promoter. The same promoters are used for both positive and negative selectable markers. To minimize random breaks between them, the distance between should be is less than about 5 kb. The targeting vector has a unique restriction site that permits linearization before transfer of the DNA into cells. Several vectors which have eight-cutter sites (e.g., the NotI restriction site) in their polylinkers are used for these constructs. Screening for targeted cells is by genomic Southern blotting using a probe that is outside the targeting vector or by by PCR.

[1760] Specific Methodology

[1761] The methods disclosed herein are all conventional in the art and are described, for example, in George E L et al., Methods in Enzymol. 245: 386-420 (1994) which are hereby incorporated by reference in their entirety.

[1762] ES Cells

[1763] The ES cell lines: CCL2, CCE, D32′ ABI, and JI are useful and are tested for germ line transmission by implanting into blastocysts of a mouse strain having a different coat color genotype. ES cell lines are derived from the 129/Sv mouse strain which carries the wild type agouti gene (brown color). Injection of these ES cells into C57BL/6 (strain with black coat color) blastocysts produces chimeric offpsring with a mix of black and agouti coat color. When the ES cells contribute to the germ line, agouti progeny are born (because agouti is dominant to black).

[1764] ES cells are are maintained in culture on mouse embryonic fibroblast (MEF) feeder cells and/or in the presence of a growth factor—leukemia inhibitory factor (LIF)—and are used at low passage numbers to maintain totipotency and avoid differentiation. The MEF feeders are prepared from embryos of an appropriate transgenic mouse strain that carries genes for resistance to the positive selection drug (e.g., G418/neomycin, hygromycin).

[1765] Reagents for ES Cell Culture

[1766] ES cell medium is a supplemented Dulbecco's modified Eagle's medium (DMEM) to which has been added L-glutamine, and sodium pyruvate and HEPES buffer; the pH is maintainedd at 7.5. For use, the medium is supplemented with the following additives: fresh glutamine, fetal bovine serum (FBS, final concentration, 15% v/v), nonessential amino acids, 2-mercaptoethanol and LIF (final concentration, 1000 U/ml) of LIF. All these components are commercially available, e.g., from GIBCO-BRL (Life Technologies, Inc.) Feeder cell medium is the above DMEM-based medium without the additives, but supplemented with FBS (10% v/v). Phosphate-buffered saline (PBS): 0.8% NaCl, 0.02% KCl, 0.02% KH₂PO₄, 0.115% NaHPO₄ (all w/v) at pH 7.4. Ethylenediaminetetraacetic acid (EDTA) is at a final concentratin of 0.2 g/liter in PBS, pH 7.2.

[1767] Trypsin-EDTA: 40 ml of EDTA, with a 2.5% (w/v) concentration of trypsin. HEPES-buffered saline (HBS): HBS: 25 mM HEPES, 134 mM NaCl, 5 mM KCl, 0.7 mM Na₂PO₄, pH7.1.

[1768] Preparation of MEF Feeder Layers

[1769] Preparation of Primary MEF

[1770] For G418-resistant feeders, a transgenic mouse line containing the neo gene is used. Similarly, if hygromycin is used for selection, feeder cells have the hyg gene.

[1771] 1. Fibroblasts are obtained by aseptically removing embryos from a 14-day pregnant mouse into PBS. One embryo at a time is dissected to remowe fetal membranes, placenta, the head and soft tissue. Each embryo is placed in a separate petri dish and minced with two scalpels or fine curved scissors. Trypsin-EDTA (fresh, 2 ml) is added to each dish and incubated at 37° C. for 5 min. Then, the reaction is stopped by addition of 8 ml of feeder cell medium to each dish, and and the contents are transferred to a conical centrifuge tube and allowed to settle for 2 min.

[1772] 2. The cell-containing supernatant of each tube is poured into one 10-cm diameter culture dish. Fresh medium is added 24 hr, and the cultures are maintained in a standard tissue culture incubator for about 1-2 days until the cells are confluent.

[1773] 3. The cells of each dish are then split into ten dishes each (10 cm) and again cultured until confluent (about 2 days).

[1774] 4. The cells or each dish are trypsinized and resuspended in 1 ml of ice-cold freezing medium (feeder cell medium, but with 20% (vlv) FBS andd 10% (vlv) dimethyl sulfoxide (DMSO). Aliquots of 1 ml per vial are frozen and stored at −80° for 24 hr. For long-term storage, vials are kept at −135° C. or in liquid nitrogen.

[1775] Feeder Layers for ES Cells

[1776] Mitotically inactivated (3,000 rads of γ-irradiation) MEFs at 2.5×10⁶ cells/dish (“dish” refers to a 10 cm diameter culture dish unless otherwise specified) are used. To achieve a uniform monolayer of feeders, plates are coated with 0.1% (w/v) gelatin for at least 5 min prior to plating cells. Feeders are either pre-plated or co-plated with ES cells. If the cells are to be co-plated, or if no medium change is planned before addition of ES cells, it is important to wash the feeder cells out of DMSO by centrifugation because ES cells are sensitive to this compound.

[1777] Routine Culture of ES Cells

[1778] ES cells are cultured MEFs (which are at a density of 2.5×10⁶/dish) for up to 10 days. ES cells are plated at relatively high density, 3×10⁶ to 1×10⁷/dish. They grow rapidly, and divide every 18-24 hr. ES cell cultures are fed daily with ES cell medium. The cells need to be passaged about every third day, and require a second feeding on the day before passage. Generally, higher viability is achieved if the cells are re-fed 2-3 hr prior to any trypsinization (for passaging or freezing).

[1779] Passaging ES Cells

[1780] 1. After rinsing the monolayers, 2 ml of prewarmed trypsin-EDTA is added to each dish which is held at 37° C. for about 5 min at which time the cells visibly detach. Trypsin action is stopped by adding 2 ml of ES medium. Cells are dispersed thoroughly with a Pasteur pipette and transferred to a conical centrifuge tube with an additional 6 ml of medium. The cells are spun for 2 min at 500 rpm. This treatment is important because ES cells do not grow well in the presence of trypsin.

[1781] 2. The supernatant is removed by aspiration and replaced with 2 ml of fresh ES medium, in which the cells are dispersed by gentle pipetting (to avoid bubbles, etc.) with a Pasteur pipette 20 times. Thorough dispersal of ES cells is important as aggregates are more likely to differentiate.

[1782] 3. For passage, ES cells are usually split 1:6, although higher density may be desired. Even before confluence ha been reached, cultures can be split in order to disperse the ES cell colonies to prevent their differentiation.

[1783] Freezing and Thawing ES Cells

[1784] The ES cells are re-fed 2-3 hr before trypsinization (see above) for freezing. They are frozen at high density; the contents of one confluent dish generally becomes six 1-ml vials. ES cells are especially sensitive to DMSO toxicity, so exposure is minimized by resuspending cells (with thorough dispersal) in ice-cold medium without DMSO first, and then adding an equal volume freezing medium which contains 2×DMSO. Vials are frozen slowly for 24 hr at −80°, then store at either −135° or in liquid nitrogen for long-term storage.

[1785] For use, the ES cells are thawed rapidly in a 37° water bath and quickly transferred to ice. The cells are spun out of DMSO in about 10 ml of ES medium, resuspended with thorough dispersal and are plated on feeder cells as described.

[1786] Transfection of ES Cells by Electroporation

[1787] 1. Linear DNA is prepared conventionally by phenol-chloroform extraction and ethanol precipitation. Vacuum-dried DNA is resuspended in sterile HBS. An aliquot is checked for degradation by comparing restriction maps of linearized and intact plasmid DNA using multiple restriction enzymes.

[1788] 2. Cells are split 1:6 as usual, 1 or 2 days prior to electroporation. Cells are fed daily and again 2-3 hr prior to electroporation. Cells are trypsinized as usual but, on dispersal of cells, about 10 ml of medium is added and returned to the incubator for 30 min. This pre-plating allows about 90% of feeder cells to reattach, further enriching ES cells. Cells are washed twice in HBS and an aliquot is counted.

[1789] 3. The cells are resuspended in ice-cold HBS at 2.5×10⁷ cells/ml. Linearized DNA is added from a concentrated stock in sterile HBS to a final concentration of 25 mg/ml, and the tubes are placed on ice for 10 min. After mixing with a Pasteur pipette, cells plus DNA are transferred into an electroporation cuvette (Bio-Rad, Richmond, Va.) and are kept on ice for 10 min. Each electroporation cuvette holds 0.8 ml, equivalent to about 2×10⁷ cells.

[1790] 4. Electroporation is carried out at 240 V, 500 mF with the Gene Pulser (Bio-Rad, Richmond, Va.) with a capacitance extender. The cells are allowed to rest for 10 min at room temperature after which they are plated with, neomycin-resistant feeders (but no selection drugs) at about 5-7×10⁶ ES cells/dish.

[1791] Selection of Targeted Clones

[1792] Beginning at 24-36 hrs after electroporation, the cells are fed daily with selection medium until selection is complete (usually 7-8 days). Cell death is observed by 3-4 days after drug addition. Selection Medium includes G418 (Geneticin; GIBCO-BRL) final concentration. The G418 is dissolved in HEPES buffer. The final concentration G418 is 200 mg/ml if PGK-neo is in the targeting construct. If pMCI-neo is in the construct, then a 150 mg/ml solution is used. For double selection, ganciclovir (Syntex Corp., Palo Alto, Calif.) is included at a 2 mM final concentration. An alternative to gancyclovir is FIAU (Bristol Meyers Squibb, Wallingford, Conn.), which is used at 0.2 mM.

[1793] Culture medium is replaced by selection medium beginning at 24-36 hr of culture. One or two plates are grown in G418 medium only, and are used to calculate the number of neomycin-resistant colonies. Cells are fed daily. Cell death is visible at about 3-4 days of selection. The colony morphology is observed carefully. Some large colonies start flattening. Clones are picked routinely at day 7 or 8 of selection before they start differentiating (but flattened colonies may still contain ES cells and canbe picked). Plates are stained with Giemsa, and colonies counted on day 10 of selection.

[1794] Other Selection Measures

[1795] The above procedures are suitable for the commonly used schemes involving the neo gene as positive selection marker and the HSV-TK gene as the negative selection marker. If hyg, HGPRT- or puromycin-resistance genes are used, the feeders are modified accordingly. One can either obtain a line of mice with the appropriate transgene or use a feeder cell line just during the time of selection. A line of STO cells doubly resistant to neomycin (G418) and hygromycin can also be used. ES cells can, and should, be returned to feeder cultures at the time of picking the clones. Selection for HGPRT is in “HAT medium” which is standard medium supplemented with 0.1 mM hypoxanthine, 0.8 mM aminopterin and 20 mM thymidine. Hygromycin selection utilizes concentrations ranging from 100 to 150 mg/ml and should be tested to determine the effective concentration.

[1796] Picking Drug-Resistant ES Cell Colonies

[1797] Clones are usually picked after 7 or 8 days of selection. Each clone is picked into an individual well of a 96-well plate containing trypsin-EDTA. Each trypsinized colony is then split into a single well of duplicate 24-well plates, so that 1 plate can be used for freezing, and the other for DNA extraction for Southern blot or PCR analysis. The transfer of cells between 96-well plates and 24-well plates is accomplished with a 12-channel pipettorwit tips in alternating channels. This allows the transfer of clones from wells #1, 3, 5, 7, 9, and 11 oof a 96-well plate into wells #1, 2, 3,4, 5, and 6 of a 24-well plate.

[1798] Trypsinization of Selected Clones

[1799] 1. Selection plates are fed 2-3 hr before picking colonies. The number of colonies to be picked is estimated, and 24 well plates with about 10⁵ MEF/well in 0.5 ml are prepared. Each colony is split in half into wells of duplicate 24-well plates.

[1800] 2. After washing once, trypsin-EDTA at 37° C. is placed in 1 row of a 96-well plate (60 μl/well). Colonies are picked rapidly in groups of 12 (one row), and the trypsin-EDTA is maintained at 37° C. Individual clones are picked by tearing each away from the surrounding feeder cells, using a ripping/tearing motion, and drawing each gently into the pipette. Before approaching a colony, the pipette is partially filled with PBS from the plate to prevent sticking of the colony to the glass, using as little volume as is sufficient to prevent the colony from sticking. Each clone is transferred to a well of the 96-well plate containing trypsin-EDTA.

[1801] 3. Six pipette tips are connected to the multichannel pipettor (channels 1, 3, 5, 7, 9, and 11) and clones 1, 3, 5, 7, 9, and 11 are dispersed by pipetting up and down several times. The cell suspension in 30 μl is transferred to the first row of one 24-well plate (prepared as above) and the remaining 30 μl to the first row of the duplicate 24-well plate. Clones 2, 4, 6, 8, 10, and 12 are dispersed and transferred in an analogous manner. (Alternatively, the trypsin reaction is stopped after picking 12 colonies in the first row of the 96-well plate by adding 60 μl complete medium and dispersing the cells. One can then pick the next 12 colonies into the second row. This is most helpful when the selection plates contain more than 12 colonies.) The cells are fed as soon as possible and then daily with 0.5 ml of complete medium.

[1802] Freezing Expanded Colonies

[1803] One of the duplicate 24-well plates is used. Cells are frozen when many of the wells are subconfluent, even if some wells are still sparse. This is important to ensure that the majority of the colonies have not grown too large and the cells begun to differentiate. Cells are frozen, at this stage only, in medium containing 10% (v/v) DMSO, fetal calf serum, and trypsin-EDTA. For this relatively short-term storage, the trypsin-EDTA does not appear to harm the cells.

[1804] 1. The cells are fed 2-3 hr before freezing. 120 μl of an ice-cold solution of 20% (v/v) DMSO and 80% (v/v) FBS (“ECS solution”) is placed in each Costar cluster tube and maintained on ice. The cells are washed with warm PBS and trypsinized with 60 μl of pre-warmed trypsin-EDTA for 5 min at 37° C. The plate is moved to ice, and each well receives 180 μl of ice-cold ECS. The cells are dispersed by pipetting up and down with six tips of the multichannel pipettor. Two frozen vials of each clone are prepared by transferring 120 μl of the suspension (clones 1-6) into one cluster tube (tubes 1, 3, 5, 7, 9, 11) and the remaining 120 μl into the neighboring tube in the same row (tubes 2, 4, 6, 8, 10, and 12). Thus, each row of clustered tubes corresponds to each row of the 24-well plates.

[1805] 2. To freeze the cells slowly, the cluster tube rack is wrapped in paper towels, placed at −20° for about 1 hr, then transferred to −70°. The cluster tube racks are maintained at −70° until positive clones are identified.

[1806] DNA Isolation for Genomic Southern Blot Analysis

[1807] 1. Clones are grown until most are confluent. High-quality DNA can be extracted even from overgrown clones. Wells are washed with PBS, 200 μl of lysis buffer are added to each well, and incubated at 37° for 30 min. Plates are stored frozen at this point. The lysis buffer: consists of 150 mM NaCl, 20 mM Tris (pH 7.5), 5 mM EDTA, 0.5% (w/v) sodium dodecyl sulfate (SDS), proteinase K (0.25 mg/ml).

[1808] 2. Lysates are transferred to 1.5-ml tubes. Racks are arranged to fit the format of a 24-well plate so that a 12-channel pipettor can be used to process the samples through all the steps.

[1809] 3. Lysate is extracted with an equal volume of phenol-chloroform; the mixture is vortexed, centrifuged and the organic phase is removed using a 12-channel pipettor. The material is then extracted with chloroform-isoamyl alcohol. The aqueous phase is transferred to clean tubes and precipitated with 20 ml of 3M sodium acetate (pH 5.2) and 0.5 ml ethanol, at −20° for 30 min.

[1810] 4. The pellets are resuspended in 10 mM Tris-HCl (pH 8.0), 1 mM EDTA (TE). The precipitation is repeated as described above, the pellets are dried and resuspended in TE. To dissolve DNA, the solution is left at room temperature for several hours or at 65° C. for 15 min. A confluent well from a 24-well plate yields approximately 10 μg of genomic DNA. One-half or one-third of each sample is digested with restriction enzymes. To aid in complete digestion, a relatively large (100 ml) volume is used and allowed to proceed overnight. The digests can then be precipitated or reduced in volume in a Speed-Vac (Savant, Hicksville, N.Y.) before loading on a gel.

[1811] Polymerase Chain Reaction Screen of ES Cell Clones

[1812] An alternative to the Southern blotting screen described above is to use the PCR, which is done on pools of clones. Characterization of ES cell clones by PCR in pools of 12 (blot analysis of PCR products is usually required) is performed as follows. Clones are maintained in culture during this quick initial screen. Positive pools are rescreened as individual clones by PCR, and subsequently confirmed by genomic blot analysis. A PCR primer is characterized that is within the targeting vector (usually in the positive selection marker) and another in genomic DNA outside the targeting vector. These primers are tested for their lowest detection limit and extent of cross-homology. To ensure reliable amplification in small amounts of genomic DNA, the amplification distance is only about 1 kb. This limits the homology with the locus to be targeted that is included in the targeting vector and thus decreases targeting frequency.

[1813] 1. Drug-resistant colonies are picked by the procedures described above, except allow colonies to settle overnight in 96-well dishes with feeders. Each colony is split into two 96-well dishes by trypsinization of the attached cells. One dish is for PCR analysis and the other is expanded. Each dish has a feeder cells and 0.2 ml of medium. Using a multi-channel pipettor, routine trypsinization is performed using no more than 50 ml of trypsin-EDTA. After thorough but gentle dispersal of cells, 25 ml is transferred to each 96-well dish with 0.2 ml of medium per well. The cells are still in dilute trypsin but can tolerate it overnight, which is enough time to settle. They are refed after 12 hr.

[1814] 2. One to 2 days after the initial split, the cells are trypsinized from 1 of the duplicate 96-well dishes as usual, but do not add medium with serum.

[1815] 3. Samples are combined by row (12 wells/pool) by dispersing in trypsin-EDTA, followed by a rinse with PBS. Microfuge the pools for 3 min. to spin down the cells.

[1816] 4. All but 5 ml of supernatant is removed and the pellet resuspended in 50 ml of water and frozen on dry ice.

[1817] 5. Cells are thawed at 95° for 8 min and cool. 10 mg of proteinase K (fresh aliquot) is added, incubated at 55° for 30 min. and incubated at 95° for 8 min. and cooled.

[1818] 6. Components for a standard 100-ml PCR reaction are added. 20 ml of each PCR reaction is run on an agarose gel and blot (various quick-blot procedures are adequate). Probe with subclone of partial amplification product.

[1819] 7. The remainder of each clone is expanded by continued culturing until the results of pooled PCR analysis are complete and fed daily.

[1820] 8. Once the PCR results are in, all clones are individually passed within each positive pool to a 24-well plate with feeders. One-half of each sample is saved for PCR analysis as an individual clone.

[1821] 9. The cells are fed daily. After 3 days, once the PCR analysis of clones is complete, each positive clone is placed on a 35- or 60-mm plate with feeders to expand for freezing (see below). Feed daily.

[1822] Thawing and Expanding Targeted Clones

[1823] For each positive clone thaw one of the cluster tubes rapidly in a 37° water bath, then cool on ice. Do not spin. Plate on a 35-mm plate with feeder cells (4×10⁵ feeder cells per plate) in 2 ml of complete medium. Feed after 12 hr. At this point, cells are cultured in normal medium without G418; it has been reported that cells maintained in G418 have a lower capacity to contribute to the germ line of injected embryos. Depending on the density of each clone, split up to 1:6. Freeze as soon as possible in small aliquots. Freeze enough aliquots for one aliquot per day of blastocyst injection. A subconfluent 60-mm plate can be frozen as eight 250 ml aliquots, in 90% (v/v) FCS and 10% (v/v) DMSO. Such an aliquot can be plated directly after thawing into one or two 35-mm plates with feeder cells, 2 days before injection.

[1824] Further Characterization of Targeted Clones

[1825] Positive clones detected by the above procedures are retested using several different restriction enzyme digestions to ensure appropriate insertion of the selectable marker into the locus; both flanks of the insertion are checked. To determine if targeted clones have any additional insertions of the targeting vector, DNA is tested with a probe containing the neo gene. Only a single band at the expected size is detected after long exposure. A further simple check of the condition of targeted cells is to count chromosomes:

[1826] 1. A rapidly growing culture is treated with Colcemid (0.06 mg/ml) for 4 hr.

[1827] 2. Cells are trypsinized, washed in PBS, and combined with washed cells from culture supernatant.

[1828] 3. The cells are resuspended in 10 ml of 0.56% (w/v) KCl, incubated at room temperature for 8 min. and spun at 300 rpm for 2 min. at room temperature.

[1829] 4. All but 100 ml of supernatant is removed and the cells resuspended. 10 ml of fixative [3:1 (v/v), methanol-glacial acetic acid] is added dropwise and incubated for 10 min.

[1830] 5. The cells are spun and resuspended in 1 ml of fixative.

[1831] 6. The cells are dropped, from a height of 10 cm, onto glass slides (2-3 drops per slide, cleaned with ethanol and dried). After the liquid has spread to the edges of each slide, blow dry.

[1832] 7. After they are completely air dried, stain the slides for 15 min. in 3% (w/v) Giemsa in PBS, wash in water and air dry.

[1833] 8. To count chromosomes is to photograph the slide on print film so that counted chromosomes can be marked. At least 30 spreads/clone are counted. At least 50% of the spreads have 40 chromosomes. Watch out for spreads with too many chromosomes as well as those lacking chromosomes.

[1834] Generation and Breeding of Chimeric Mice

[1835] The animal and equipment requirements and procedures for generating chimeric mice by injection of ES cells into blastocysts is as follows. C57BL/6 mice are used as embryo donors and strain CD1 as foster mothers. Contribution of ES cells, which are derived from strain 129/Sv mice and have agouti coat color, is clearly evident in contrast to the black coat color of the donor embryo.

[1836] The following procedure yields healthy ES cells as a single-cell suspension. Two days prior to blastocyst injection, one of the frozen aliquots [90% (v/v) serum, 10% (v/v) DMSO] is thawed rapidly in a 37° water bath and plated directly into two 35-mm dishes with feeder cells (4×10⁵ feeders per plate). The medium is replaced the next morning, daily, and 2 hr before trypsinization. One plate is trypsinized at the beginning of an injection session and the second about 3 hr later, in freshly prepared 0.25% (v/v) trypsin (GIBCO-BRL) 0.02% (v/v) EDTA in PBS at 37° for 5 min. Cells are gently dispersed after adding an equal volume of ES cell medium and pellet. Cells gently resuspended (by drawing them in and out of a Pasteur pipette 20 times) in 2 ml of ice-cold ES cell medium and kept on ice until transfer to the injection chamber.

[1837] General Guidelines for Blastocyst Injection

[1838] The procedure requires an inverted microscope with interference-contrast or phase-contrast objectives. The magnification range required is ×40 to ×200. The injection microscope is equipped with a cooling stage (blastocysts are more resilient to the injection procedure when they are kept at 5-10°). A pair of micro manipulators is used one for the holding pipette and one for the injection pipette. The manipulators from Leitz Instruments are especially useful. Flow in each pipette is regulated by hand, using a micrometer to adjust a Hamilton syringe. To obtain donor embryos, a stereo dissecting microscope (total magnification, ×20) is required for flushing blastocysts from the uterus and collecting them for culture. Blastocysts are cultured in a tissue culture dish, in microdrops of medium under light-weight paraffin oil, in 5% CO2 in air at 37° During an injection session, several small batches of blastocysts are transferred from culture to the injection chamber with trypsinized ES cells. The easiest blastocysts to inject are those that have expanded fully but have not yet hatched from the zona pellucida. Loading ES cells into the injection pipette is done with care so as not to damage the cells. The injection pipette is just large enough to accommodate the ES cells, but not much larger, because damage to the blastocyst would be more likely to occur. Each blastocyst is injected with 15-20 ES cells. After injection, the blastocysts are returned to culture for at least 1 hr before surgical transfer to a pseudopregnant female. The surgery is performed on the bench with general anesthesia, using a stereo dissecting microscope. Each female receives 10-12 blastocysts; uninjected blastocysts are transferred along with injected ones, to help prevent complications in the pregnancy due to small litter size.

[1839] Chimeric animals are monitored by coat color. The 129/Sv-derived ES cells give rise to an agouti (brown) coat whereas the recipient C57BL/6 embryos produce black coat color. Desirable chimeras have a high proportion of brown coat. To determine if targeted ES cells have contributed to the germ line of chimeric mice, male chimeras are bred with C57BL/6 females. Agouti pups are the result of ES cell-derived sperm. If the targeted mutation is heterozygous viable, then one-half of the agouti pups will carry the targeted allele. However, if none of the chimeras derived from a given ES cell clone has high coat color chimerism then germ line transmission is unlikely. Discard chimeras if none of the first 60 pups contains the targeted allele and, because most ES clones give chimeras of which around 50% give germ line transmission, we would discard a clone if none of the first 5 or 6 chimeras gives agouti pups.

[1840] It is necessary to obtain germ line transmission from at least two independently derived ES cell clones in order to ensure that any phenotype of the resulting mice arises from the targeted mutation and not from some other mutation that occurred during handling of the ES cells.

[1841] Genotyping Mice: Tail Blots and Polymerase Chain Reaction Analysis

[1842] Genomic DNA, isolated from tail biopsies, is analyzed by either Southern blot or PCR. Generally, mice must be at least 3 weeks old to tolerate the general anesthesia used in cutting the tail. With a fresh razor blade, cut a 1-cm length from the tip of the tail and cauterize the remaining tail with a soldering iron. DNA is isolated by a simplified procedure that is amenable to large numbers of DNA samples. Transfer the tail biopsy to a 1.5-ml tube that contains 0.5 ml of tail lysis buffer: 100 mM Tris-HCl (pH 8.5), 5 mM EDTA, 0.2% (w/v) SDS. 200 mM NaCl, proteinase K (100 mg/ml) (Boehringer Mannheim, Indianapolis, Ind.). Continuously rotate the samples overnight at 55° and Vortex the tubes, and spin down hairs and tissue debris in a microfuge for 5-10 min. Transfer the supernatant to a fresh tube containing 0.5 ml of 2-propanol and mix thoroughly. Recover the precipitate with a pipette tip and transfer to a fresh tube containing 100 ml of 10 mM Tris-HCl, 0.1 mM EDTA, pH 7.5. Make certain that DNA is dissolved by incubation at 37° with intermittent vortexing.

[1843] To analyze tail DNA by Southern blot, a single-copy probe that hybridizes with wild-type and targeted alleles is required. Generally such a probe has already been characterized for use during screening for targeted ES cells. Generally 15 ml of DNA prepared as above is sufficient for one lane of a Southern blot. Restriction digestion should be carried out in a final volume of at least 50 ml, with at least 40 units of enzyme and in the presence of bovine serum albumin (BSA; 0.1 mg/ml) and 4 mM spermicide. Digestions usually require several hours to overnight for completion. If the DNA does not digest well, a phenol-chloroform extraction followed by reprecipitation is likely to help. A variety of standard blotting procedures suitable for genomic DNA can be used. Capillary blotting to a nylon membrane, ultraviolet (UV) cross-linking, and hybridization in sodium phosphate and SDS at 65° work well.

[1844] As an alternative, PCR amplification of unpurified tail DNA using appropriate PCR primers can be used. Tail (5-10 mm) is added to 0.4 ml of PCR tail buffer 150 mM KCl, 10 mM Tris-HCl (pH 8.3), 2.5 mM MgCl₂, gelatin (0.1 mg/ml), 0.45% (wlv) Nonidet P-40 (NP-40), 0.45% (w/v) Tween 20]. Incubate overnight at 55° with shaking and with addition of two 25 ml aliquots of proteinase K (10 mg/ml) added at an interval of several hours. Heat at 95° for 10 min to denature residual proteins, cool to room temperature, and spin. Five microliters of each DNA sample should give definitive ethidium bromide signals after PCR amplification with primers for each allele.

[1845] To analyze DNA by PCR, primer pairs are designed that indicate the presence of the wild-type allele versus the targeted allele. This is accomplished as follows: First, both alleles are assayed by a set of three primers, one of which is within the neo gene, as described in Polymerase Chain Reaction Screen of ES Cell Clones, above. Alternatively, separate primer pairs are used to assay the alleles:one pair within the neo gene, and the other pair in the wild-type gene. In both these strategies, designing primers that yield amplification products of different sizes allows detection of both alleles in a single reaction tube and gel lane. Care is taken not to contaminate reagents with amplification products. Organization of reagents into single-use aliquots is highly recommended.

[1846] Generation of Homozygotes

[1847] To determine if homozygous mutant animals are viable, heterozygous crosses are performed and all pups genotyped at weaning. The expected 1:2:1 ratio of genotypes, or lack of it, becomes evident in three to four litters. However, genotype ratios are kept for all heterozygous crosses performed. Ideally, mice derived from two or three independent targeted clones are available. Heterozygous crosses is carried out for each targeted clone, as well as between clones. The interclonal crosses show that any phenotype is the result of the targeted mutation rather than some other mutation occurring in the ES cell clone. For a homozygous viable mutation, the next job is to show that the targeted mutation is truly a null allele. Procedures will depend on the gene/protein of interest. This has been performed quite thoroughly for the tenascin-deficient mice and for P-selectin-deficient mice at both the mRNA and protein level.

### EXAMPLE 53

[1848] Animal Models of Infectious Diseases for Testing Superantigen-Lip-IDA Conjugates, Anti-Sense Oligonucleotides, Gene Knockout Mice Immune Cells Deleted of Inhibitory IR_{IDA} and/or ITIMs or ITAMs

[1849] Abbreviations: IR_{IDA}=Inhibitory Receptor for Lipid-Based Infectious Disease Associated Antigens, Lip-IDA=Lipid-Based Infectious Disease Associated Antigens, IR_{SAg}=Inhibitory Receptor for Superantigens, IR_{TAA}=Inhibitory Receptors for Lipid-Based Tumor Associated Antigens.

[1850] Tuberculosis

[1851] C57BL/6 mice are used. These mice are natural-killer-cell-deficient. Beige mice [David: are you using beige mutants on a B6 background? This is not clear here are infected with many of the nontuberculous mycobacteria: MAC (what is this), M. kansasii, M. simiac, M. malmoense or M. genavense. Same-sex mice aged 5-7 weeks are allowed to acclimate for 1 week in the facility before being used. They are housed in microisolator units (Lab Products, Maywood, N.J.) and are randomly distributed six to a group.

[1852] Inoculum and Infection Process

[1853] Primary cultures of MAC (M. kansasii or other mycobacteria) to be used for infection are obtained from clinical isolates of patients with disseminated MAC infection, or the American Type Culture Collection (ATCC). ATCC 49602 (serotype 1) strain LPR and MAC 101 (provided by Lowell Young, California Pacific Medical Center Research Institute, San Francisco, Calif.) are used. Organisms are grown in modified 7H10 broth (7H10 agar formulation with agar and malachite green omitted), pH 6.6, with 10% (vol./vol.) Middlebrook oleic-acid—albumin-dextrose-catalase (OADC) enrichment (Difco Laboratories, Detroit, Mich.) and 0.05% (vol./vol.) Tween 80 (Sigma, St Louis, Mo.). Broth cultures are started from one transparent, smooth, flat colony (SmT) grown on an agar plate. The culture tube is placed in an orbital shaker and incubated at 37° C. for 3-5 days. Culture suspensions are predominantely (>95%) of the smooth, transparent, and flat (SmT) phenotype which is more virulent and more resistant to antimycobacterial agents than the smooth, domed, opaque (SmD) or rough phenotypes. After incubation, the culture is diluted in 7H10 broth to a concentration of 10 Klett units/ml (Manostat colorimeter, Manostat, New York, N.Y.) or approximately 5×10⁷ cfu/ml. The inoculum is titrated in triplicate on 7H10 agar plates (Difco) supplemented with 5% (vol./vol.). Middlebrook OADC enrichment. Plates are taped with Blenderm® (3M, St Paul, Minn.), incubated for 2-3 weeks at 37° C., and then counted to determine the precise inoculum.

[1854] Treatment Schedule and Controls

[1855] 1. Aerosol Infection at Low Doses

[1856] The preferred model is to expose mice to a very low inoculum of bacilli using an aerosol generation chamber. After uptake of about 50 bacilli in the lungs the infection grows progressively at first and is then curtailed around 20 days. Laboratory strains of mycobacteria such as Erdman attain 4-5 logs in the lungs by this time. More virulent strains such as CSU93 (Tennessee outbreak) and strabn W (New York) can grow to between 6 and 7 logs in this time.

[1857] 2. Intravenous Infection at High Doses

[1858] The high-dose intravenous model is also employed. Most of the inoculum is taken up by phagocytes in the spleen and liver and only 1-2% can be detected in the lungs. The organisms grow progressively for 10-15 days in the spleen, and to a lesser extent in the liver, until acquired immunity is generated, resulting in a “chronic” disease pattern. Thus, the genetic construct under test is given soon after inoculation or after the disease has become chronic. This more closely resembles the human condition as the patient is probably at this stage before initial diagnosis.

[1859] The inoculum is injected iv in a 0.2 ml volume using a 0.5 ml syringe with an attached 28 g meedle to deliver a total of approximately 10⁷ cfu/mouse. Each experiment consists of an early control group (sacrificed 1 week postinfection at the initiation of therapy) and a late control group (sacrificed at the end of therapy), neither of which receives any treatment. One treatment group consists of a drug with known to activity (e.g., azithromycin or clarithromycin). Treatment is started 7 days postinfection and is generally continued for 10 days in succession. In extended therapy experiments, treatment is given daily (Mon-Fri) for 4 or more weeks.

[1860] Mice are weighed at the beginning and end of each trial, and averaged by group. Mice are evaluated daily, and changes in appearance or behaviour are noted. In general, infected mice appear outwardly well, and continue to gain weight with these infections. There have been some exceptions where the infected control animals have succumbed to the infection. Untreated mice develop splenomegaly, hepatomegaly (with visible lesions), and enlarged lungs. Splenomegaly, although minimal, is evident at 1 week postinfection (average weight 0.12-0.14 g) and continues to increase for the duration of the trial (average weight 0.65-0.80 g at 18-20 days postinfection). After 1 week of infection, the usual organ bacterial counts in the lungs of early control mice (10^{4.5}) is significantly less than that in the spleen (10⁷). The late control mice (19 days postinfection) average 10⁶ and 10^{7.8} cfu in their lungs and spleens respectively.

[1861] At the completion of the trial (2 days after the end of the treatment phase), mice are euthanized. Their spleens and right lungs are aseptically removed. Spleens are weighed. Each organ is placed in a grinding assembly containing normal saline and Tween 80 and each sample is ground and allowed to sit for 15 min to allow for settling of aerosols. The tops of the grinding assemblies are removed and an aliquot is removed. Dilutions are made to the appropriate concentrations for plating using tubes containing double-distilled H₂O (to promote red blood cell lysis) with saline-Tween 80.

[1862] Spleen weights are used to estimate dilutions for the plating of the homogenate. Large spleens, such as those belonging to members of the late control group, are heavily infected and need to be diluted. The lungs are less infected than the spleens in this model and usually require 10-100 times less dilution. Each organ is plated at three different dilutions on 7H10 agar (Difco) plates containing 5% OADC enrichment. Plates are incubated for 2-3 weeks and counted to determine viable cell counts, which are expressed as counts/organ.

[1863] Key Parameters to Monitor Infection and Response to Treatment

[1864] Mice show some or all of the following signs of infection: a hunched posture with or without difficulty ambulating, isolation from the rest of the group in their cage, labored breathing, and shivering, lack of eating and/or drinking and diarrhea. Upon introduction of a new agent, mice are monitored initially and during the first hour for any indications of pain or discomfort, allergic reaction or swelling. During the first 3 days of therapy, the mice are monitored at least twice daily to note their general appearance. Any injection site is inspected for swelling or irritation. The general condition of the animals is carefully noted. Mice having an acute reaction are euthanized immediately.

[1865] Therapeutic Regimen and Treatment Schedule

[1866] Therapy is begun 7 days postinfection. Determination of the spleen and lung viable bacterial cell counts is done several days after the completion of therapy. Although daily treatment for 10 days allows for differentiation of relative activities, longer treatment periods (4-12 weeks) are useful to characterize efficacy.

[1867] Administration of the therapeutic constructs is started on day 20 (when the first animal becomes DTH-positive) and is continued 2-3 time weekly for four weeks. Bacterial loads are determined at 35 and 50 days. Isoniazid (25 mg/kg/day) is given as the positive control drug in each trial.

[1868] Outcome

[1869] Treated animals show elimination and/or reduction of viable organisms in the spleens and lungs or spleen weights of therapy groups in comparison to those in the spleens and lungs of the control (infected, but untreated) groups. These differences are statistically significant using the Wilcoxin rank test or other statistical method known in the art.

[1870] Additional comparison is made between the therapy groups and the group given a standard therapy such as clarithromycin or azithromycin.

[1871] Leishmaniasis

[1872] Infection Procedure

[1873] BALB/c mice are infected iv to give the quickest and most reproducible infection in the liver, spleen and bone marrow. The inoculum of parasites, either amastigote or promastigotes, is loaded into a 1 ml syringe fitted with a 23 g needle. For experimental infection, an inoculum of 10⁷ amastigotes in a volume of 0.1 to 0.2 ml is injected intravenously (or in hamsters, by the intracardiac route). This will produce a microscopically detectable infection in the liver of mice and liver and spleen of hamster after 1 week of infection. This level is suitable for tests of the therapeutic constructs described herein.

[1874] Administration of Therapeutic Constructs

[1875] Therapeutic constructs [David: what are they?] are administered to mice by a variety of routes (s.c., ip. and p.o.) and for some formulations i.v. administration by the tail vein is required. In the mouse model, treatment is best evaluated against an established infection on days 7-11 post-infection. If a lower infection inoculum is used, tests can be carried out on days 14-18 post-infection. In the commonly used BALBIc mouse the infection in the liver increases linearly until days 21-28 following infection by 10⁷ amastigotes or promastigotes; after this point the liver infection becomes chronic and eventually cure. The spleen infection, although microscopically detectable from week 1, is fully established after the week 4. If the infection is left untreated for several weeks prior to treatment, chronic granulomatous infection is established which has been shown to be less sensitive to standard drugs. In an alternative approach in mice, treatment with therapeutic constructs is started immediately after infection. A 5-day course of treatment is sufficient to determine relative potencies of the constructs.

[1876] Outcome

[1877] In the early stages of infection VL [David: what is VL?] in mice presents no obvious external symptoms. Extra mice or hamsters are infected and sacrificed prior to administering the conjugates to check that the infection is established. Microscopic examination of stained slides prepared from the liver and/or spleen of will indicate whether the inoculum was satisfactory and that infection has been established. The appearance of hamsters does change in the later stages of infection. The most noticeable features are weight loss and dulling of the hair. Occasional hamsters may develop ascites. These clinical changes in the untreated controls are contrasted with changes in the treated population. The treated groups show none of these changes in the course of therapy.

[1878] At the end of treatment the mice are weighed to give an estimation of drug toxicity. The livers and spleens are removed from freshly sacrificed animals and weighed. Smears are prepared from the livers and spleens on microscope slides, fixed in methanol for 1 minute and stained with Giemsa stain for 45 minutes. The number of parasites per 500 liver cells and/or spleen cells is determined microscopically for each experimental animal. This figure is multiplied by total organ weight (mg) and this figure, the Leishman-Donovan unit (LDU) is used as the basis for calculating the difference in parasite load between treated and untreated animals. Treated animals show complete elimination or reduction in the number of parasites/500 liver and/or spleen cells. The difference in parasite loaded between the treated and control groups is statistically significant using the Wilcoxon rank test. The activity of novel compounds is compared with that of the standard antimonial drugs and expressed as a therapeutic ratio.

[1879] Trypanosoma cruzi {Chagas Disease)

[1880] Chagas disease has been observed in different mammal species. Several animal models have been used experimentally—mice, hamsters, dogs, rats, rabbits and monkeys. The course of the T cruzi infection varies widely between these species, depending upon the host and parasite strains used, the route of inoculation and the size of the inoculum.

[1881] Mouse Model

[1882] The mouse model is cheaper, easy to work with and it can produce both the acute and the chronic phases of the disease. Various mice strains differ markedly in their resistance to T cruzi. More resistant strains might providea good model for the chronic disease. At this stage, the murine model of Chagas' disease is used in experimental therapy. Several strains of mice have been used in this model: Swiss, weight 18-20 g, female; Balb/c, 8-10 weeks, female; albino [what is albino? it's a mutation and coat color, not a strain!!], weight 18-20 g male. Preliminary experiments are performed to determine the optimal parasite inocula to insure infection.

[1883] The parasites are maintained by serial passage through female C3H/He mice, a resistant strain. Mice with parasitemia are bled into heparinized (1000 UA) PBS (50:50) and cryopreserved.

[1884] Hamster Model

[1885] Hamsters (non-isogenic Syrian hamsters, Mesocricetus auratus, male/female) are infected with T cruzi. During the acute phase an inflammatory reaction is observed characterized by mononuclear and polymorphous leukocyte infiltration of variable degree in the majority of tissues and organs. In the chronic phase the same kind of lesions can be observed, but the inflammatory process is less severe and characterized by mononuclear infiltration in the myocardium (Ramirez L E, et al., Rev Soc Bras Med Trop, 1994 27:163-916). The authors noted high levels of parasitemia in the beginning of the infection, which varied with the strain used.

[1886] Parasite Strain & Stages of Disease

[1887] Different parasitic strains behave quite differently in experimental Chagas' disease with regard to characteristics such as the course of infection, the degree of parasitemia, tissue tropisms, histopathological changes and mortality. Several strains of T cruzi have been used in different animal model and include Y Emane, Benedito and Vicentina. Strains of T. cruzi, from different geographical areas, had previously been characterized into various types according to their infectivity rate and tropism in mice. The classification includes the following:

[1888] 1. Type I, characterized by a rapid course of infection in mice, high levels of parasitemia and mortality around the 9^{th} and 10^{th} day of infection, with predominance of slender forms and macrophage tropism during the acute phase of the infection.

[1889] 2. Type II shows increasing parasitemia from the 12^{th} to the 20^{th} day of infection, low mortality rate, predominance of broad forms of the parasite and myocardial tropism.

[1890] 3. Type II shows a slow development of parasitemia that reaches a high level 20-30 days after inoculation, low mortality and predominance of parasitism in skeletal muscles.

[1891] Inoculation & Infection Process

[1892] The inoculum range is usually from 10³ to 10⁷ trypomastigotes (obtained from infected animals) or 2-4×10³ metacyclic trypomastigotes (obtained from triatomid bugs). Acceptable inoculation routes are intraperitoneal and conjunctival. Mice weighing 18-20 g are inoculated by the intraperitoneal route with 5×10⁴-1×10⁵ trypomastigotes which produces a homogeneous infection. Daily trypanosome counts provide the following pattern for the parasitemia: parasites appear from the 4^{th} or 5^{th} day after inoculation, their number decreases markedly on the 6^{th} day, increases until the 7^{th} or 8^{th} day, and decreases again around the 9^{th} day. From the 10^{th} day onwards the pattern of parasitemia is irregular. Most infected animals die in the period from the 5^{th} to the 20^{th} day after inoculation; the highest mortality rates are observed around the 15^{th} day. Mortality rates are about the same for both sexes and only a small number of infected animals will outlive 40 days.

[1893] The administration of constructs begins on the day after inoculation and doses corresponding to abut one-fifth of the LD₅₀ are given for 10 consecutive days. On the 5^{th} day after inoculation the number of parasites in 5 mm³ of blood is determined. On the 8^{th} day, when the number of parasites in the inoculated animals is generally higher, a new count is performed.

[1894] Outcome

[1895] The best initial criteria for therapeutic activity in the experimental Chagas' disease is mortality and parasitemia. Parasitemia is usually high with little variation, depending on the strain used and follow-up is done by daily fresh blood examination. The blood is collected and the parasites counted in a Neubauer's chamber. The acute phase of the infection is followed by a chronic stage in which parasites are reduced to submicroscopic level, then indirect laboratory methods are used, such as subinoculation, xenodiagnosis and serological techniques. The polymerase chain reaction has been used as a complementary criterion for therapeutic activity in the chronic stage of experimental Chagas disease.

[1896] The following techniques are used to establish reliable criteria for cure in the mouse model of Chagas' disease:

[1897] 1. Fresh blood examination: a drop of blood from the tail is carefully examined in a Neubauer chamber daily or every other day.

[1898] 2. Blood subinoculation: mice are killed about 1 or 2 months after treatment and 0.4-0.6 ml of citrated blood, collected from the severed axillary artery, is inoculated intraperitoneally into susceptible mice. From the 5^{th} day of inoculation, fresh blood examinations are performed daily or every other day for a period of at least 6 weeks.

[1899] 3. Blood culture: blood from treated animals is inoculated into Noeller's culture medium and culture examined for at least 30 days after inoculation.

[1900] 4. Xenodiagnosis: 1 or 2 months after treatment, mice are anesthetized and 4 triatomine nymphae are allowed to feed on them. After 45-50 days, the bugs are carefully examined for trypanosomes.

[1901] 5. Histological examination: histological sections of the heart of treated animals are stained with hematoxylin and eosin and examined.

[1902] 6. Re-inoculation: some of the treated animals are reinoculated at different times after treatment with about 4000 blood parasitic forms per gram of body weight; daily counts of trypanosomes are performed so that a new acute phase of the disease can be detected.

[1903] Treated animals show 80-100% cures and prolonged survival associated with elimination or reduction in parasitemia compared to untreated control groups. The differences are statistically significant using the Wilcoxon rank test or other non-parametric or parametric statistics known in the art.

[1904] Antisense Oligonucleotides and IR_{IDA}, ITIM, ITAM or SLAP Gene Knockout to Delete or Inactivate IR_{IDA}s and/or ITIMs, ITAMS or SLAP

[1905] In a representative ex vivo protocol, using the murine TB, Leishmania and trypanosome models described above, an antisense oligonucleotide at a dose of 0.01-1 mg corresponding to the coding region of IR_{IDA} ITIM or SLAP is added to autologous T cells in culture. The uptake of the oligonucleotides by the cells is confirmed using oligonucleotides labeled at the 5′end with fluorescein isothiocyanate (FITC). To check for inactivation of the the IR and ITIMs or SLAP by the oligonucleotides, Western blot quantitation is carried out on the lysed T cells. Expression of the IR_{IDA} genes and their respective ITIM genes is downregulated by >95%.

[1906] In a parallel experiment, T cell are deleted of the gene encoding the IT_{IDA} and their respective ITIM or SLAP by homologous recombination with a mutant gene. The knockout T cells and the antisense-treated T cells are expanded in IL-2 for 24-72 hours, harvested and reinfused into mice with established tuberculosis, leishmaniasis or trypansomiasis. Optionally the T cells are exposed to Lip-IDAs for 24 hours before the addition of IL-2. The animals are sacrificed at the end of the experiment and assayed for residual disease as described above. Results are statistically assessed as given above and show that the adoptively transferred knockout T cells induce greater than 95% reduction in the number of residual organisms.

[1907] In a representative in vivo experiment, mice are inoculated with organisms. The antisense phosphorothioate oligodeoxynucleotide corresponding to an antisense-sensitive part of the IR_{IDA} genes and of their respective ITIM genes and a control antisense construct (the same nucleeotide composition but with a jumbled sequence) are used.

[1908] A single dose of ITIM or SLAP antisense or control antisense (1 mg per 0.1 ml saline per mouse) or saline (0.1 ml per mouse) is injected s.c. into the right flank of mice once the disease is established in the above models At each indicated time, the animals from the control and antisense-treated groups are killed and residual organisms assayed as described above.

[1909] The uptake of ITIM or SLAP antisense in the tissues is assessed by photo affinity labelling followed by immunoprecipitation of ITIM or SLAP as follows: The tissues are homogenized with a Teflon/glass homogenizer in ice-cold buffer 10 (Tris-HCl pH 7.4, 20 mM; NaCl, 100 mM; NP-40, 1%; sodium deoxycholate, 0.5%; MgCl, 5 mM; pepstatin, 0.1 mM; antipain, 0.1 mM; chymostatin, 0.1 mM; leupeptin, 0.2 mM; aprotinin, 0.4 mg ml; and soybean trypsin inhibitor, 0.5 mg ml; filtered through a 0.45-pm pore size membrane), and centrifuged for 5 min in an Eppendorf microfuge at 4° C. The amount of ITIM in organs is determined by photoaffinity labelling with ⁸N-3-[³²P]cAMP followed by immunoprecipitation with anti-ITIM antibodies.

[1910] In a second representative in vivo experiment, IR_{IDA}/ITIM or SLAP knockout mice are prepared by the above methods. They are then inoculated with organisms as above. On day three following injection, the mice are immunized with 0.1-1 -mg of Lip-IDAs alone or conjugated to SAgs (see Section 51 and 55) in CFA. If unconjugated Lip-IDA is given, SEB (0.01-0.1 mg) is administered i.p. 2-3 times per week for three weeks. Separate groups of mice are treated with Lip-IDAs or SAgs alone or with CFA or saline or without either Lip-IDAs or SAg respectively. The mice are sacrificed on day 21 and the number of residual organisms assayed as above.

[1911] Alternatively, the antisense oligonucleotides complementatry to IR_{IDA} ITIM or SLAP (0.01-1 mg/mouse) are injected intravenously into mice with established disease. Lip-IDA and SAg or conjugates thereof (Sections 51 and 55) are given on the same schedule as immediately above. Infectious burden is assayed at the end of experiments in both treated and untreated groups as indicated above. Results show >95% reduction in infectious burden in treated animals compared to controls.

### EXAMPLE 54

[1912] Animal Tumor Models: Antisense Oligonucleotides and Gene Knockout Mice and Cells Deleted of Inhibitory Receptors for Lipid-Based Tumor Associated Antigens (IR_{TAA}) and/or Inhibitory Receptors for Superantigens (IR_{SAg}) and/or their ITIMs and/or ITAMs and/or SLAP

[1913] In a representative ex vivo protocol, using the MCA 205/207 murine sarcoma model in C57BL/6 mice (see Examples 15-16), antisense oligonucleotide 0.01-1 mg corresponding to the coding region of IR_{TAA}/IR_{SAg} ITIM or SLAP are added to autologous T cells in tissue culture. The uptake or the oligonucleotides by the cells is confirmed using oligonucleotides labeled at the 5′end with fluorescein isothiocyanate (FITC). To check for inactivation of the the IR and ITIMs or SLAP by the oligonucleotides, Western blot quantitation is carried out on the lysed T cells. The IR_{TAA} and IRSA genes and their respective ITIM genes are downregulated by >95%. In a parallel experiments, T cell are deleted of the gene encoding their IR_{TAA} or IR_{SAg} genes and their respective ITIM SLAP genes by homologous recombination with a mutant gene. The knockout T cells and the anti-sense treated T cells are expanded in IL-2 for 24-72 hours, harvested and reinfused into C57BL/6 mice with established pulmonary metastases as described in Example 16. Optionally the T cells are exposed to lipid-based TAAs or SAg or SAg transfected tumor cells or SAg transfected tumor cell/dendritic cell fusion cells (Example 25-26) for 24 hours before the addition of IL-2. The animals are sacrificed 21 days later and the number of pulmonary metastases counted. Results are statistically assessed as given in Examples 15-16 and show that the adoptively transferred knockout T cells induce a >95% reduction in the number of pulmonary metastases.

[1914] In a representative in vivo experiment, MCA 205/207 tumor cells (1.5×10⁶) are inoculated s.c. into the left flank of C57/B1 mice. The antisense phosphorothioate oligodeoxynucleotide corresponding to the codons for IR_{TAA} and IR_{SAg} genes and their respective ITIM or SLAP genes and control anti-sense (the same base composition as the antisense with the sequence jumbled) are used. A single dose of ITIM or SLAP antisense or control antisense (1 mg per 0.1 ml saline per mouse) or saline (0.1 ml per mouse) are injected s.c. into the right flank of mice when tumour size reached 80-100 mg, 1 week after cell inoculation. Tumor volumes are obtained from daily measurement of the longest and shortest diameters and calculation by the formula, 4/30r³ where r=(length+width)/4. At each indicated time, two animals from the control and antisense-treated groups are killed, and tumours removed, weighed, immediately frozen in liquid N, and kept frozen at −80° C. until used.

[1915] Photoaffinity labelling followed by immunoprecipitation of ITIM is carried out as follows: The tumors are homogenized with a Teflon/glass homogenizer in ice-cold buffer 10 (Tris-HCI, pH 7.4, 20 mM; NaCI, 100 mM; NP-40, 1%; sodium deoxycholate, 0.5%; MgCl, 5 mM; pepstatin, 0.1 mM; antipain, 0.1 mM; chymostatin, 0.1 mM; leupeptin, 0.2 nM; aprotinin, 0.4 mg ml; and soybean trypsin inhibitor, 0.5 mg ml; filtered through a 0.45-pm pore size membrane), and centrifuged for 5 min in an Eppendorf microfuge at 4° C. The supernatants are used as tumour extracts.

[1916] The amount of ITIM or SLAPin tumours is determined by photoaffinity labelling with 8-N3-[³²P]cAMP followed by immunoprecipitation with the ITIM antibodies. In a representative in vivo experiment, IR_{TAA}/ITIM Knockout C57BL/6 mice are prepared by above methods. The MCA 205/207 tumor cells (2-3×10⁵) are then injected intravenously to induce pulmonary metastases. On day three following injection, they are immunized with 0.1-1 mg of Lip-TAAs alone or conjugated to SAgs (Section 51 and 55) in CFA. If unconjugated Lip-TAA is given, SEB (0.01-0.1 mg) is administered i.p. 2-3 times per week for three weeks. Separate groups of mice are treated with Lip-TAAs or SAgs alone or with CFA or saline or without either Lip-TAA or SAg respectively. The mice are sacrificed on day 21 and the number of metastases in the lung are counted as given in Example 16.

[1917] Alternatively, the antisense oligonucleotides complementatry to the IR_{TAA} or IR_{SAg} or ITIM or SLAP coding sequences (0.01-1 -mg/mouse) are injected intravenously into C57BL/6 mice with MCA 205/207 tumors present subcutaneously ((at least 1 mm in diameter) or with pulmonary metastases established by injection of 2-3×10⁵ tumor cells intravenously 3 days before. Lipid-based TAA and SAg or conjugates thereof (Sections 51 and 55) are given on the same schedule as immediately above. Tumor size is measured weekly in both treated and untreated groups. The number of pulmonary metastases in the treated and untreated groups is determined as given in Examples 16 and 21. Results are evaluated statistically as given in Examples 16 and 21 and show >95% reduction in tumor size and pulmonary metastases in treated animals compared to controls.

### EXAMPLE 55

[1918] Preparation of Lip-TAAs and Lip-IDAs of Bacterial, Fungal, Yeast, Parasitic, Mycobacterial, Invertebrate or Protozoan Origin

[1919] Isolation and Characterization of Glycosphingolipids

[1920] The following are procedures for obtaining purified glycosphingolipid antigens and lipid-based SAg receptors (digalactosylceramides) from biological sources for use in treatment of cancer and infectious diseases. The major membrane bound glycosphinolipids useful for treatment of cancer include the alpha mono-, di- and tri-galacotsylceramides in mammalian cells, phytosphingosines present in yeast, vertebrate and plant cells as the well established array of tumor associated membrane antigen e.g., GD2 neuroblastoma associated antigens. It also includes the vast array of glycosphingolipid antigens associated with infectious diseases as given in Section 54.

[1921] The basis for extraction of glycosphingolipids from biological sources is their solubility in chloroform-methanol mixtures. Gangliosides (glycosphingolipids containing neuraminic acids) and glycosphingolipids with five or more carbohydrate residues are not only soluble in chloroform-methanol mixtures but also form molecular aggregates that are soluble in water. Glycosphingolipids with one to four residues, form emulsions in water which is the basis for the Folch partition (chloroform-methanol (2:1) with one-fifth volume of water or dilute KCl solution) in which gangliosides are partitioned into the upper water-methanol layer and neutral glycosphingolipids remain in the lower chloroform-methanol layer. Most glycosphingolipids are easily extracted from tissue or other material with chloroform-methanol (2:1) but quantitative extraction of gangliosides requires more polar extraction mixtures such as chloroform-methanol (1:1) or chloroform-methanol (1:2). Metal ions also affect the distribution of gangliosides in biphasic systems. Glycosphingolipids are separated from a total lipid extract by silicic acid column chromatography followed by thin-layer chromatography. Ion exchange cellulose (DEAE) column chromatography is used to separate acidic compounds, such as sulfatide and gangliosides, from less acidic or nonpolar compounds.

[1922] Extraction and Partition

[1923] All solvents used in the following procedures are redistilled from glass to remove nonvolatile compounds. Chloroform is stabilized by the addition of methanol (after distillation) to a final concentration 0.25% (by volume). Chloroform-methanol and other mixed solvents are given as volume/volume ratios. A weighed portion of the tissue to be extracted is vigorously homogenized with seven volumes of methanol (w/v) in a blender or homogenizer. Fourteen volumes of chloroform are added and the mixture homogenized again. The final solvent ratio is chloroform-methanol (2:1). The material is filtered with a Buchner funnel using an aspirator and a coarse-grade solvent-washed filter paper. The residue is reextracted with 10 volumes (based on weight of the original material) of chloroform-methanol (2:1). After filtration, the residue is extracted a third time with 5 volumes (v/v) of chloroform-methanol (1:1) or chloroform-methanol (1:2). The third extraction is only necessary for quantitative removal of gangliosides. The final combined extract is adjusted by addition of chloroform so that the final proportion is chloroform-methanol (2:1). A volume of 0.1 M KCl equivalent to one-fifth that of the final solvent extract is added, mixed vigorously, and allowed to stand at 4° overnight or until the layers are completely separated. If the volumes are small, the layers are separated by centrifugation. The upper and lower layers are washed three times with theoretical lower and upper phases, respectively, prepared by shaking a mixture of 1 volume of chloroform-methanol (2:1) and 0.2 volume of 0.1M KCl in water and letting the phases separate. With large volumes of combined extracts, the solvents are evaporated in vacuo and the residue redissolved in a convenient volume of chloroform-methanol (2:1) for the partition and washing steps described above.

[1924] The combined lower phases (original and washes) are collected and reduced in vacuo to a small volume with gentle warming (<50°) on a rotary evaporator (fraction I). The combined upper aqueous phases are dialyzed against cold tap water for 24 hours and then lyophilyzed (fraction II). The lyophilyzed material, usually containing some insoluble protein, is extracted with chloroform-methanol-water (10:5:1), filtered and reduced to a small volume on a rotary evaporator. Fraction II generally contains only gangliosides and may be analyzed by thin-layer chromatography without further purification (see below).

[1925] Silicic Acid Column Chromatography

[1926] The lipids from the chloroform-methanol layer (fraction I) are fractionated into neutral lipids, glycolipids, and phospholipids on a column of Unisil silicic acid (Clarkson Chemical Co., Williamsport, Pa.). This procedure is useful for glycolipids containing from one to four glycosyl residues and for sulfatides. Inisil (20-40 g per gram of lipid) is activated at 80° for several hours and is slurried with chloroform as quickly as possible after removal from the oven and poured into a column. The adsorbent is washed with about three bed volumes of chloroform or until it is translucent. The column is not allowed to run dry. A 20 mg/ml solution of the sample is applied in chloroform. Neutral lipids are eluted with about five bed volumes of chloroform and then glycosphingolipids are eluted with 8 to 10 bed volumes of acetone-methanol (9:1). Phospholipids are eluted with 5 bed volumes of methanol.

[1927] A different procedure has been used to isolate a particular glycolipid on a preparative scale, as in the purification of trihexosyl ceramide, gal (1→4) gal (1→4) glc-ceramide, from a kidney of a patient with Fabry's disease (trihexosylceramidosis). A crude glycolipid and phospholipid mixture is obtained from fraction I by addition of 200 ml of ether and filtration of the resultant glycolipid-phospholipid precipitate at room temperature. The glycolipid mixture (3 g in one experiment) is then subjected to mild alkali-catalyzed methanolysis. A silicic acid column (400 g) is prepared in chloroform-methanol (19:1), and the sample applied in chloroform-methanol (19:1). The column is eluted successively with 1500 ml each of 12%, 14%, 16%, 20%, 30%, and 50% methanol in chloroform. Fabry trihexosylceramide (1.5 g) is eluted as a pure compound in the 20% fraction. The 16% and 30% fractions also contain some (1 g) of the Fabry lipid mixed with other glycolipids. A similar mixture of glycolipids is fractionated on a silicic acid column using a continuous gradient from 5% to 50% methanol in chloroform.

[1928] Mild Alkali-Catalyzed Methanolysis

[1929] The glycolipid fraction from the silicic acid column is treated with mild base to remove contaminating phospholipids. This treatment does not affect glycolipids or gangliosides unless they contain an O-acyl group. The following quantities are used for 1-10 mg of glycolipid fraction. Add 1 ml of chloroform and 1 ml of 0.6 N NaOH in methanol to the dry fraction and allow the mixture to react at room temperature for 1 hour. Then add 1.2 ml of 0.5 N HCI in methanol, 1.7 ml of water, and 3.4 ml of chloroform, mix well, centrifuge, and remove the lower layer containing the glycolipids. Wash the lower layer three times with methanol:water (1:1) and then evaporate it to dryness in vacuo. If a ganglioside fraction is to be methanolyzed, the sample is treated in the same way except that after neutralization with methanolic HCl the sample is dried in vacuo, emulsified in water and dialyzed against tap water at 4° for 24 hours. The nondialyzable material is lyophilyzed and applied to TLC plates as described below.

[1930] Thin-Layer Chromatography

[1931] Glycosphingolipids are separated on thin-layer plates of silica gel G, H, or HR. The plates are prepared and activated at 100° C. for 2-4 hours. Plates of 0.25 mm thickness are used for general work and plates of 0.75 mm thickness are used for preparation of large quantities of material. Thin-layer tanks are lined with paper and equilibrated with solvent for 4 or more hours before use. Commercial pre-prepared TLC plates (Quantum Industries, Fairfield, N.J., Brinkman Instruments Inc., Westbury, N.Y., and Analtek Inc., Wilmington, Del.) have been used successfully for qualitative analysis of glycosphingolipids. Separation on these plates, however, is not usually as great as on plates made in the laboratory and contaminants are often obtained when silica gel is removed from pre-prepared plates and eluted with solvents.

[1932] A glycolipid mixture obtained from a column is separated into various components on a silica gel H plate (0.25 mm) using a chloroform-methanol-water (100:42:6) solvent system. Some hematoside, NANA(2→3)gal(1→4)glc-ceramide, (FIG. 1, lane A) is usually partitioned into the lower phase of a Folch wash and is separated from human or porcine globoside, αgalNAc (1→3)gal(1→4)gal(1→4) glc-ceramide in this system. Monohexosyl ceramide, α-glc- and α-gal-ceramide, and dihexosyl ceramide, α-gal (1→4) glc-ceramide and α-gal-(1→4) gal-ceramide, often appear as two spots because of the presence of a-hydroxy fatty acids in the ceramide. Otherwise the two forms of monohexosyl and dihexosylceramide are not separated on silica gel alone. Glucosylceramide and galactosylceramide, however, have been resolved on borate-impregnated thin-layer plates. Sulfatide (galactosylceramide sulfate) is not usually completely separated from dihexosylceramide, but these compounds can be completely separated by DEAE chromatography. Gangliosides larger than hematoside remain very near the origin in this system.

[1933] Gangliosides and neutral glycosphingolipids with more than four glycosyl residues are separated by more polar solvent systems such as chloroform-methanol-water (60:45:10) or chloroform-methanol-2s N NH₄OH (65:45:9). In the latter case, when gangliosides are involved, the plate is developed two times with thorough drying (4 hours at room temperature) between developments. Hematoside is well separated from globoside on silica gel G plates with this system.

[1934] Glycosphingolipids are visualized with iodine vapor or by spraying with a 2% a-naphthol solution (in ethanol) followed by concentrated H2S04 spray and heating for 10 minutes at 100°. The a-naphthol spray gives deep red-purple spots with carbohydrate-containing compounds and brown spots with phospholipids or neutral lipids. As little as 1-10 mg of material is visualized in this way. Gangliosides are specifically visualized by spraying with the following solution: mix 10 ml of 3% resorcinol (stored in refrigerator) with 80 ml of concentrated HCl, 0.25 ml of 0.1 M CuSO4 and enough water to make 100 ml of solution. The sprayed plate is placed horizontally in a closed jar and heated in an oven at 125° for 20 minutes. Gangliosides appear as black or purple areas and other compounds appear as light brown areas.

[1935] Preparative thin-layer chromatography is carried out by streaking the sample on a 0.75 mm thick plate and developing as outlined above. Only the edges of the streak are visualized with I₂ or a-naphthol and areas containing neutral glycolipids are removed from the plate and the silica gel is eluted with chloroform-methanol-water (100:50:10). Gangliosides are eluted from silica gel with more polar solvents such as chloroform-methanol-water (50:50:15).

[1936] DEAE Column Chromatography

[1937] Water-soluble oligoglycosylceramides are separated from gangliosides from fraction II by the following procedure. Diethylaminoethyl cellulose (DEAE) in the acetate form is washed and columns are prepared. The sample is applied in chloroform-methanol (7:3) and neutral glycolipids are eluted with 8 bed volumes each of chloroform-methanol (7:3) and (1:1). Gangliosides are retained on the column and are eluted with 10 bed volumes of chloroform-methanol (2:1) saturated with aqueous 58% NH₄OH.

[1938] Dihexosylceramide and sulfatide isolated from a preparative TLC plate as described earlier is separated on a DEAE column. The sample is applied in chloroform-methanol (9:1) and neutral dihexosylceramide is eluted with 10 bed volumes each of chloroform-methanol (9:1) and chloroform-methanol (7:3). The sulfatide is eluted with chloroform-methanol (4:1) made 10 mM with respect to ammonium acetate, to which is added 20 ml of 28% aqueous ammonia per liter. Sulfate analysis of lipid fractions is carried out.

[1939] Florisil Column Chromatography

[1940] An alternative method of isolation of glycosphingolipids is by Florisil column chromatography of the peracetylated glycolipids wherein all the glycophingolipids (except polysialylgangliosides) are isolated in one fraction. Briefly, the procedure consists of peracetylation of the total lipid extract with pyridine-acetic anhydride (3:2) (1 ml per 50 mg of dry total lipid). The pyridine and acetic anhydride are removed in vacuo with additions of toluene, and the products are applied to a Florisil column (40 g per gram of lipid), and neutral lipids and cholesterol are eluted with dichloroethane (8 bed volumes). Peracetylated glycosphingolipids are eluted with 8 bed volumes of dichloroethane-acetone (1:1), and phospholipids are eluted with 5 bed volumes of dichloroethane-methanol-water (2:8:1). Acetyl groups are removed from the glycolipids with 0.25% sodium methoxide in chloroform-methanol (1:1) (1 ml per 25 mg of lipid) at 25° for 30 minutes. The mixture is neutralized with acetic acid, emulsified in water and dialyzed overnight at 40 The glycolipid fraction, analyzed by TLC, is free of contaminating phospholipids.

[1941] Characterization of Glycosphingolipids

[1942] The first step in the characterization of glycosphingolipids is the complete cleavage of the lipid into its component parts which is carried out by methanolysis with 0.75 N methanolic HCl. The products of methanolysis of a glycosphingolipid are sphingolipid bases and their O-methyl derivatives, fatty acid methyl esters, and methyl glycosides. These components are separated by solvent extraction and analyzed by gas-liquid chromatography.

[1943] Methanolysis

[1944] A solution of a glycosphingolipid (up to 1 mg), isolated from columns or thin-layer chromatography plates, is evaporated to dryness in an 8-ml culture tube fitted with a Teflon-lined cap. Three milliliters of 0.75 N methanolic HCl (prepared by bubbling gaseous HCl into methanol) is added to the sample, and the capped tube is heated at 80° for 12-20 hours. At the end of this period, 0.05-0.3 mmole of mannitol (in methanol) is added as an internal standard. The sample is extracted three times with 1 ml hexane to remove fatty acid methyl esters. The hexane solution of methyl esters is retained for GLC analysis. Approximately 100 mg of solid Ag₂CO₂ is added to each tube and carefully mixed until neutral. Methyl glycosides of amino sugars and neuraminyl methyl ester, and sphingosines- are N-acetylated by addition of 1 ml of acetic anhydride. The remaining Ag, CO₃ and AgGl act as catalyst for this reaction. The mixture is allowed to react for 6-16 hours at room temperature, after which the sample is centrifuged and the precipitate is washed with methanol several times. About 0.25 ml of H₂O is added to decompose excess acetic anhydride, and the sample is evaporated under a stream of nitrogen. If N-acetylation is not performed, the neutralized sample is centrifuged, washed, and evaporated to dryness under nitrogen.

[1945] Trimethylsilylation and Gas-Liquid Chromatography of Methyl Glycosides

[1946] Dry samples of methyl glycosides are converted to trimethylsilyl (TMS) derivatives by addition of pyridine-hexamethyldisilazane-tri-methyichlorosilane (8:2:1) (about 50 mM for 500 mg of lipid). The mixture is allowed to stand for 15 minutes at room temperature and an aliquot is injected into the gas-liquid chromatograph. The mixed silane solution is cloudy and is used without centrifugation, but exposure to water vapor is avoided. If very small amounts of sugars are present, the sample is evaporated under nitrogen and redissolved in a convenient solvent such as pyridine or CS₂.

[1947] An aliquot of the solution of TMS derivatives is injected into a gas-liquid chromatographic column (2 m by 3 mm) of 3% SE-30 or OV-1 on Supelcoport (80/100 mesh, Supelco Inc., Bellefonte, Pa.) at 160° with nitrogen carrier gas (25 ml/minute). Programming from 1500 to 2500 at 30 per minute is useful when sialic acids are present. A. chromatogram of a methanolyzed sample of globoside, galNAc(1→3)gal (1→4) gal (1→4) glc-ceramide shows three peaks for TMS methyl-D-galactoside (a, g, and b forms); two peaks for methyl-D-glucoside (a and b forms); and two major peaks for methyl-2-acetamido-2-deoxy-D-galactoside. Other methods are useful for gas-liquid chromatography of methyl glycosides are suitable for identification of glycolipids containing fucose, glucose, galactose, galactosamine, glucosamine, and sialic acid. Mannose exhibits peaks overlapping with galactose and if these two sugars are present, the method employing alditol acetates is preferred.

[1948] The ratios of glucose and galactose are determined without conversion factors by simply comparing the ratio of the totat peak areas of each methyl glycoside. Since many glycosphingolipids contain only one glucose, ratios are usually expressed in relation to glucose and for globoside the ratio of galactose to glucose is 2. The ratio of galactosamine to glucose calculated in this way is usually about 0.65 for globoside. Methanolysis, N-acetylation, and trimethylsilylation is carried out to obtain reproducible ratios for hexosamines. The mass ratio obtained for N-acetylneuraminic acid to glucose is usually 1.0 to 1.2, and these values should be compared with those obtained from known gangliosides treated in the same way. The absolute quantity of galactose and glucose are determined by comparison to the internal standard mannitol with the use of the following equation.

mmoles glucose=area of glucose peaks/area of mannitol peak×1.25×mmoles of mannitol added

[1949] The mannitol peak falls between the second glucose peak and the first galactosamine peak and does not interfere with either compound. The area of peaks is calculated by triangulation.

[1950] Fatty Acids and Sphingosines

[1951] Normal fatty acids and a-hydroxy fatty acids are determined qualitatively and quantitatively by gas-liquid chromatography of the fatty acid methyl esters obtained from the hexane extract of the methanolyzate. Sphingosines are determined by hydrolysis of the glycolipid with aqueous HCl followed byN-acetylation and GLC of the TMS derivatives. A colorimetric assay and a method involving GLC of aldehydes produced by NaIO4 cleavage of sphingosine are also available.

[1952] Enzymatic Degradation of Glycosphingolipids

[1953] Specific glycosidases are used for sequence determination and anomeric analysis of glycolipids. Glycosyl residues are released sequentially from globoside (cytolipin R reacts in the same way) by stepwise treatment with the following glycosidases; β-hexosaminidase from jack bean, α-galactosidase from fig ficin, and β-galactosidase from jack bean. Reactions are carried out with 100 mg of lipid in 0.1 ml of 0.1 M sodium citrate buffer at pH 5, containing 100 mg of crude ox bile sodium taurocholate. After 18 hours at 37°, reaction mixtures are frozen and lyophilized. One milliliter of chloroform-methanol (2:1) is added and the mixture is sonicated for 5 minutes. After centrifugation, the supernatant fraction is dried, taken up in a small amount of chloroform-methanol (2:1) and spotted on a silica gel HR plate. The plate is developed in chloroform-methanopwater (100:42:6) and visualized with 12 vapors or a-naphthol spray. Products are identified by cochromatography with standards and by elution, methanolysis and GLC analysis.

[1954] Mass Spectrometry of TMS Glycosphingolipids

[1955] Mass spectrometry of intact TMS derivatives of glycolipids gives information about the sugar groups, the fatty acid and the sphingosine portion of glycosphingolipids. Bis (trimethylsilyl)trifiuoroacetamide (100 ml) and pyridine (50 ml) are added to 20-200 mg of the purified glycosphingolipid in a small capped vial and heated at 60° for about 30 minutes. An aliquot containing 10-20 mg of the TMS glycolipid is evaporated to dryness under nitrogen in a mass spectrometer direct probe tube. The samples are volatilized in the mass spectrometer ion source at temperatures ranging from 10° to 180° depending on the size of the oligosaccharide unit.

[1956] The following information can be obtained by comparison of the resulting mass spectra with those of reference samples: (1) whether the terminal residue is a hexose or hexosamine; (2) the number of and nature of -N-acetylneuraminic acid groups (i.e., terminal or branched); (3) whether N-acetyl and/or N-glycolylneuraminate is present; (4) information regarding the number of glycosyl residues present and the fatty acid and sphingosine composition. Because of the the inability to distinguish between hexoses, this technique in conjunction with other techniques, such as permethylation analyses, and studies with specific glycosidases.

[1957] Ozonolysis of Glycosphingolipids

[1958] The carbohydrate portion of glycosphingolipids is cleaved from the lipid portion. The glucose-sphingosine linkage is broken but there is no hydrolysis of other glycosidic linkages, including those of sialic acid residues. The glycolipid (100 mg) is ozonized in 50 ml of methanol at room temperature. Ozone consumption is monitored by bubbling the effluent gas through a KI-starch solution which blackens when excess ozone is present. The solution is dried in vacuo and the compound is hydrolyzed with 10 ml of 0.2 M Na₂CO₂, for 12 hours at 20°. Sodium ion is removed by stirring with Dowex 50 (H+) and the resin is filtered. After a Folch partition, the upper aqueous phase is lyophilized and the resultant oligosaccharides (about 80% yield) are stored in a desiccator. The procedure is changed for microscale operation (1 mg of lipid).

[1959] Permethylation of Glycosphingolipids

[1960] Permethylation, hydrolysis, and gas-liquid chromatography of glycosphingolipids is used to determine linkage of glycosyl residues. Permethylation is carried out using methyl sulfinyl carbanion. Sodium hydride (0.88 g of 57% in oil) is washed six times under nitrogen with dry hexane, drained thoroughly, and stirred with dimethyl sulfoxide (10 ml) under a stream of nitrogen at 70° for 3 hours or until bubbling ceases and the solution turns a dark clear green. Any dark precipitate is removed at this point by centrifugation. The carbanion solution (about 0.5 ml) is added under a stream of nitrogen to the glycolipid sample in 0.5 ml of dimethyl sulfoxide, and the mixture is sonicated briefly. After standing at room temperature for 2-6 hours, 1.5 ml of CH3I is added dropwise under nitrogen, and the mixture is allowed to react for 1 hour. After this step, it is not necessary to keep the reaction dry. The permethylated glycolipids are extracted into chloroform, the chloroform layer is washed once with 1% Na2S3O3 to remove I₂, and four times with water. The chloroform fraction is mixed with absolute ethanol and is evaporated under nitrogen. Two milliliters of 1 NH₂SO₄ is added, and after heating at 105° for 12 hours the hydrolyzate is neutralized with BaCO₃ diluted, and filtered on Celite and filter paper, washing the Celite twice with water (5 ml). The sample is concentrated to 5 ml and percolated onto a small Dowex 50 H+ column. Neutral sugars are eluted with water and methanol-water (1:3) (10 ml each) and amino sugars are eluted with 0.3 N NH4OH. The resulting partially methylated sugars are reduced with NaBH4, the products are acetylated and gas-liquid chromatography is carried out.

[1961] Partial Hydrolysis of Glycosphingolipids

[1962] The presence of N-acetylneuraminic acid or N-glycolylneuraminic acid in a ganglioside sample is determined by mild acid hydrolysis of the neuraminic acid followed by TLC or GLO analysis. The N-acylneuraminic acids are released from gangliosides (0.1-0.2 mg) with 1 ml of 0.05 M HCl (aqueous HCl) at 80° for 1 hour. The solution is extracted with chloroform and the aqueous phase is percolated through about 2 g of Dowex 1 (acetate form) in a small column. The column is washed with 8 ml of water, and the neuraminic acids are eluted with 10 ml of 1 M formic acid. The sample is analyzed on silica gel C plates using n-propanol-water-concentrated ammonia (6:2:1). The Rf of N-acetylneuraminic acid is 0.41 and that of N-glycolylneuraminic acid is 0.28. This sample is also be derivatized with bis(trimethylsilyl)trifloroacetamide and analyzed by GLC. Neuraminic acids are usually analyzed by GLC as their TMS-methyl ketoside methyl ester derivatives. A ganglioside sample (0.1 mg) or mixture of glycolipids is methanolyzed with 2 ml of 0.05 M methanolic HCl (1 part 12 N HCl and 240 parts methanol) at 80° for 1 hour. The cooled solution is extracted three times with 3 ml hexane and the methanolic layer is evaporated to dryness under nitrogen. Pyridine-hexamethyldisilazane-trimethylchlorosilane (8:4:2) (50 ml) is added and the TMS derivatives are analyzed on a 3% OV-1 column (2 m×2 mm) at 205°. The sulfate moiety of sulfatide (up to 2 mg) is released by reaction with 2 ml of 0.05 N methanolic HCI for 4 hours at room temperature. The reaction mixture is neutralized with aqueous NaOH and the glycolipid product is extracted by Folch partition with 4 ml of chloroform. The chloroform layer is washed with 2 ml of methanol-water (1:1) and is analyzed by TLC.

[1963] The carbohydrate sequence of glycosphingolipids is determined by partial degradation under mild acidic conditions. The glycolipid (1 mg) is hydrolyzed with 1 ml of 0.3 N HCl in chloroform-methanol (2:1) at 60° for various times up to 2 hours. After Folch partition (with addition of 0.2 volume of water) the lower phase is dried in vacuo and the upper phase is deionized with Amberlite CG-4B resin (OH form). The glycolipids (from lower phase) are purified by TLC and analyzed by GLC after complete hydrolysis. The upper phase is analyzed for sugars (and polysaccharides) by GLC. Trihexosyl ceramide, α-gal(1→4)gal (1→4)glc ceramide, hydrolyzed for 2 hours in this way did not yield ceramide but yielded cerebroside containing only glucose, and a dihexosyl ceramide containing glucose and galactose in a 1:1 molar ratio. The water-soluble fraction contained galactose and a disaccharide but no glucose. These data provide evidence for a linear arrangement of the hexose units as given above.

[1964] Characterization of the oligosaccharide moieties of glycolipids by partial degradation is also been carried out by treatment of glycolipids with 0.1 N aqueous HCl for 30 minutes to 3 hours, and by treatment of gangliosides with 0.01 N H₂SO₄ at 85° for 1 hour and 0.1 N H₂SO₄ at 100° for 1 hour.”

[1965] Mixed Molecular Species of Glycosphingolipids

[1966] The purification and characterization of glycosphingolipids is complicated by the fact that naturally occurring glycosphingolipids which are homogeneous in the carbohydrate portion are heterogeneous in the sphingosine and fatty acid portions. Complete hydrolysis and subsequent analyses of the fatty acids and long-chain bases provide information about the extent of this heterogeneity. Additional heterogeneity results when there are glycosphingolipids with identical composition but which differ in glycosidic linkage and/or anomeric configuration of one or more glycosidic bonds. Such mixtures probably cannot be separated by TLC alone. Whether or not products which are homogeneous by TLC actually contain such mixtures can only be determined with techniques such as permethylation and sequential enzymatic degradation.

[1967] Extraction of Inositolphosphorylceramides (InsPCers)of Fungi and Yeast

[1968] Extraction of lnsPCers from Saccharomyces cerevisiae and from the mycelial phase of Neurospora crassa is as follows: Cells uniformly labeled with [³H]inositol are used to gauge the extraction efficiency of a variety of procedures. Treat the cells with 5% trichloroacetic acid at 0° C. to destroy phospholipases, known to be activated by organic solvents during lipid extraction, followed by extraction with a slightly alkaline, warm, water-rich mixture of ethanol-diethylether-water-pyridine. This method approached 100% extraction of the labeled inositol; Some water-poor solvents completely failed to extract the InsPCers. The adopted procedure has been used for InsPCer extraction from other fungi such as Histoplasma capsulatum and from fresh tobacco leaves and has been used for the extraction of lipophosphoglycan from Leishmania donovani. In the absence of labeling of InsPCer components, efficacy of InsPCer extraction could be judged by monitoring total long-chain base and/or very-long-chain fatty acids.

[1969] Purification of InsPCers

[1970] Purification of INsPCers is no different from any very polar, acidic lipid. First, InsPCers precipitate almost quantitatively at low temperature after adjusting to pH 5 the initial lipid extracts from S. cerevisiae, H. capsulatum, N. crassa, and tobacco leaves. Second, mild alkaline methanolysis is used to destroy the ester-containing lipids in crude or semipurified extracts; however, stronger alkaline conditions should be avoided owing to the lability of unsubstituted inositol attached by a phosphodiester bond. Finally, liquid chromatography on silica gel columns is used for isolating InsPCers; low levels of salt in the eluting solvents are required to chromatograph macroscopic quantities of the very polar InsPCers. A solvent polar enough to dissolve a practical amount of the very polar InsPCers yields insufficient retention. Inclusion of salt increases the retention presumably by providing a charged surface for the negatively charged InsPCers. In contrast, the salt had little influence on the retention of neutral lipids.

[1971] Extraction and Purification of Galactosylceramides

[1972] Cell Culture

[1973] Human kidney cells (PT cells) are prepared as described previously (Chatteree et al., Proc. Natl. Acad. Sci. (1983)). Human cadaver kidneys (post mortem <12 hr) are used for the isolation of PT cells. Glucosylceramide was prepared from the spleen of a Gaucher's patient. Digalactosyklceramide is prepared from the kidney of a Fabry's patient. Other GSLs are purchased from Sigma. Normal rat kidney cells were purchased from the American Tissue Culture Collection (Rockville, Md.). Cells (×10⁴) are seeded in 24 well trays and grown for 6 days in medium containing 10% fetal calf serutn (Hyclone, Utah).

[1974] Lipid Extraction and Fractionation of GSL from Human Kidney

[1975] Total lipids are extracted from freeze-dried cultured PT cells or human kidney cortex or both by vigorous homogenization and extraction with hot (50° C.) chloroform:methanol 2:1 (v/v) 10 ml/mg protein. The lipid extracts are filtered on a sintered disc tunnel and the non-lipid residue is extracted further with hot chloroform-methanol 1:2 (v/v) containing 5% H2O. Lipid extraction is pursued at 50° C. for 30 min with constant stirring. The lipid extract is filtered on a sintered glass funnel and the residue is extracted further, first with hot chloroform:methanol:water 1:2, 5%) and then with methanol. The lipid extracts are pooled and dried by flash evaporation. Water-soluble contaminants are removed from the lipid extracts.

[1976] Isolation and Purification of GSL

[1977] The lower phase lipid fraction obtained following Folch partitioning of human kidney total lipids is fractionated into neutral lipid, GSL and phospholipids by silicic acid chromatography as described previously (Chatterjee et al., 1982). The acetone:methanol fraction containing GSL is subjected to alkaline methanolysis, neutralized and dried under a nitrogen atmosphere. The dried residues are solubilized in chloroform:methanol 2:1 (vlv) and subjected to HPTLC on Silica gel HPTLC plates with chloroform:methanol:water (65:25:4, v/v) as the developing solvent. The individual GSLs are identified with aniline diphenylamine (OPA) reagent or iodine vapours. The chromatogram is calibrated with authentic GSL standards of known structure. The total GSL fraction was precipitated with ether and subjected to mild alkali-catalysed methanolysis, dialyzed against water and separated by silicic acid chromatography. The silicic acid column is equilibrated with chloroform:methanol (19:1) and a sample suspended in the same solvent is applied on the column bed. The column is eluted successively with 12, 14, 16, 20, 30 and 50% methanol in chloroform, and the fractions are dried in a nitrogen atmosphere. The various fractions are analysed for the composition of GSLs. Several of the fractions obtained when the column is eluted with 14% methanol in chloroform contained digalactosylceramide. Such preparations of digalactosylceramide are further characterized by high-performance liquid chromatography (HPLC) and are utilized for binding to SEB.

[1978] Quantitation of GSL

[1979] GSLs are quantified by HPLC, after perbenzoylation. An aliquot of perbenzoylated GSL sample is suspended in hexane and subjected to HPLC on a Spherisorb Si-5 column with detection at 230 nm. The amount of GSL is calculated by using a standard curve for the respective GSLs.

[1980] Characterization of Galactosylceramides

[1981] Acid hydrolysis of GSLs are carried out followed by TLC of sugars on aluminium-backed silica gel 60 (without indicator) HPTLC plates with the use of 2-propanol-1% sodium borate (3:1, v/v) as the developing solvent. The sugars are localized by spraying the plate with 10% H2SO4 in 50% ethanol and heating at 150° C. for 10 min in an incubator. Anomeric linkage of the purified GSL receptor is determined using b-galactosidase, a-galactosidase and b-glucosidase An aliquot of the purified GSL receptor is incubated with or without b-galactosidase, b-galactosidase and b-lucosidase in 0.05 M citrate buffer (pH 5.4) containing taurodeoxycholate for 18 h at 37° C. The reaction is terminated with chloroform:methanol (2:1 vlv) and the lower chloroform layer is subjected to HPTLC. The plate is developed with aniline DPA reagent.

[1982] GC-MS of GSL

[1983] Suitable aliquots of the putative SEB receptor are subjected to acid-catalysed methanolysis (Esselman et at., 1972). The methyl sugars, methyl fatty acids and methyl sphingosines are purified by solvent extraction as described above. They were dried in a nitrogen atmosphere and derivatized by employing trimethylchlorosilane reagent. The derivatized samples (fatty acid methyl esters) suspended in hexane were injected into a Varian-3400 gas chromatograph (DB-wax capillary column, 30 m; J and W Company, Califomia) that is attached to a mass spectrometer ITD-850, Finnigan Ion Trap detector. Helium is used as a carrier gas. Temperature programming from 160° C. to 250° C. at 1° C./min is employed to separate the various fatty acid methyl esters. The TMSi sugars are separated on a DB-5 column using temperature programming from 160° C. to 250° C. at 1° C./min. Data analysis of TMSi sugars is pursued by the use of a Compaq deskpro-2862 computer. Suitable aliquots of the GSL are subjected to microscale permethylation. The gas chromatography column (DB-5 capillary column. 0.25 mm×30 m) is calibrated with authentic standards of mixtutes of partially methylated alditol acetates (Biocarb. Chemicals, Sweden). Temperature programming is from 160° C. to 250° C. at 1° C./min and from 250° C. to 350° C. at 2° C./min.

### EXAMPLE 56

[1984] Transfection of Thymidine Kinase Gene into Activated Immunocytes

[1985] In order that the immunocytes with deleted or inactivated IRs do not undergo unlimited proliferation in vivo it is necessary to provide a method for eliminating these cells after they have performed their tumoricidal function in vivo. To achieve this effect, a retrovirus-mediated transfer of a gene encoding a ‘prodrug’, a reagent that confers sensitivity to cell killing following subsequent administration of a suitable drug. is used. Thymidine kinase (Wigler M et al., Cell, 11: 223 (1977); Colbere-Garapin F et al., Proc. Natl. Acad. Sci., 76: 3755 (1979)) is encoded by the cellular, HSV, or vaccinia virus tk genes and the HSV-tk gene is used as a prodrug gene. The HSV-tk gene is transfected into immunocytes by methods given in Example 1. The HSV-tk confers sensitivity to the drug gancyclovir by phosphorylating it within the cell to form gancyclovir monophosphate which is subsequently converted by cellular kinases to gancyclovir triphosphate. This compound inhibits DNA polymerase and causes cell death. The immunocytes are administered to the host. Unopposed proliferation of immunocytes cells deleted of IR_{TAA}s, IR_{SAg}s, IR_{IDA}s in response to tumor associated lipid-based antigens may lead to immunocyte excess. Therefore, after the immunocytes have performed their tumor killing in vivo, gancyclovir is administered in conventional pharmacologic doses which induces apoptosis of HSV-tk transfected immunocytes.

### EXAMPLE 57

[1986] Deletion of Immunocyte and Antigen Presenting Cell LipTAA Receptors in Tumor Bearing Hosts

[1987] Lip-TAA receptors are deleted or inactivated in T Cells, NKT Cells and NK Cells in vivo and in vitro using but not limited to anti-sense oligonucleotides gene knockouts Examples 51-52. Immunocytes and accessory cells used for adoptive transfer are depleted of their TGG receptors using antisense and gene knockout technology as given in Examples 51-52. The T Cells, NKT Cells and NK Cells (collectively immunocytes) and accessory or antigen presenting cells including but not limited to macrophages, dendritic cells, fibroblasts, B cells and with deleted or inactivated TGG receptors are therefore protected from ganglioside-induced immune suppression and are capable of inducing an anti-tumor response.

[1988] Model Tumor Systems for Testing Efficacy of Immunocytes Deleted of Lip-TAA Receptors

[1989] Tumor models used for determining efficacy of ganglioside receptor deletion or inhibition on immunocytes and accessory cells are given in Examples 20-23.

[1990] The deletion or inhibition of ganglioside receptors on immunocytes or accessory cells in tumor bearing hosts is carried out in vivo. Alternatively, the deletion or inhibition of ganglioside receptors on immunocytes or accessory cells can be achieved ex vivo and the treated cells used for adoptive immunotherapy. Outcomes are given in Examples 21, 23.

[1991] General Procedures for Ex Vivo Sensitization of Immunocytes Depleted of Lip-TAA Receptors to Produce Tumor Specific Effector Cells for Adoptive Immunotherapy

[1992] MCA 205/207 tumor cells, A/20 lymphoma cells, FBL-3, a Friend virus-induced erythroleukemia of B6 origin, is (provided by Dr. Philip Greenberg) and Lewis lung carcinoma cells are used. Tumor growth is initiated by subcutaneous inoculation of mice on both flanks with 1.5×10⁶ tumor cells suspended in 0.05 ml of HBSS. After 9-12 days of tumor growth (approximately 8 mm in diameter), tumor-draining inguinal LN are removed sterilely. Lymphocyte suspensions are prepared by teasing LN with needles followed by pressing with the blunt end of a 10-mi plastic syringe in HBSS. Tumor draining LN cells depleted of ganglioside receptors are stimulated in vitro in a two-step procedure. Briefly, 4×10⁶ LN cells in 2 ml of complete medium (CM) containing the superantigens are incubated in a well of 24-well plates at 37° C. in a 5% CO₂ atmosphere for 2 days. CM consisted of RPMI 1640 medium supplemented with 10% heat-inactivated FCS, 0.1 mM nonessential amino acids, 1 mM sodium pyruvate, 2 mM freshly prepared L-glutamine, 100 ug/ml streptomycin, 100 U/ml penicillin, a 50 mg/ml gentamycin, 0.55 mg/ml fungizone (all from GIBCO, Grand Island, N.Y.) and 5×10⁻⁵ M 2-mercaptoethanol (Sigma). The cells are harvested, then washed and further cultured a 3×10⁵/well in 2 ml of CM with IL-2. After 3-day incubation in IL-2, the cells are collected and counted to determine the degree of proliferation. Finally, the cells are suspended in appropriate media for flow cytometric analysis, evaluation of cytotoxicity and lymphokine secretion, or for adoptive immunotherapy.

[1993] General Adoptive Immunotherapy Protocol

[1994] Mice are injected with 2 to 3×10⁵ syngeneic MCA 205 or 207 fibrosarcaoma tumor cells suspended in 1 ml of HBSS to initiate pulmonary metastases. This is the preferred animal model for evaluation of the adoptively transferred effector cells (Shu S. a at, l. Immunol 152: 1277-1288 (1994)). Other models of tumor metastases are induced by injection of:

[1995] (a) with 2×10⁶ B16 or FBL-3 (erythroleukemia) cells in the spleen to induce liver metastasis,

[1996] (b) intravenously with 3 ×10⁵ B16 or 2×10⁶ LLC (Lewis lung carcinoma) cells for pulmonary metastases or;

[1997] (c) subcutaneously with 2×10⁶ B16 cells (melanoma) for subcutaneous tumor growth on day 0. On day 3, ganglioside receptor depleted immunocytes or accessory cells are given i.v. at numbers indicated generally 10⁶-10³ into syngeneic hosts. In some instances, mice are also treated with 15,000 U IL2 in 0.5 ml HBSS twice daily for 4 consecutive days to promote the in vivo function and survival of the activated cells. On day 20 or 21, all mice are randomized, killed and metastatic tumor nodules enumerated. If pulmonary metastases exceeds 250, this number is arbitrarily assigned for statistical analysis. The significance of differences in metastases numbers between experimental group is determined by the Wilcoxon rank sum test. Two sided p values of <0.1 are considered significant. Each experimental group consists of at least five mice and no animal is excluded from the statistical evaluation.

### EXAMPLE 58

[1998] The Lip-TAAs expressed and shed by tumor cells are isolated and tested for capacity to bind to various lipid binding proteins and to inhibit mitogen induced T cell proliferation. The best binding agent for use in vivo as a decoy to bind Lip-TAAs and prevent their uptake by APCs of T cell is selected from among the Siglecs, prosaposins, saposins, glycolipid transfer proteins (GLTP), non-specific lipid transfer agents and other ganglioside binding proteins. Monoclonal antibodies specific for Lip-TAAs are also useful as Lip-TAA binding agents. They are particularly useful when it is determined that immunosuppressive Lip-TAAs share a common antigenic domain. The natural Lip-TAA binding agents are preferred because of their broad specificity and unlike monoclonal antibodies do not require preparation of a new agent for each variant immunosuppressive ganglioside identified.

[1999] Extraction of Gangliosides from Tumors

[2000] Gangliosides are purified from pools of human tumors and/or serum lipoprotein fractions as previously described. Briefly, tumor tissue is homogenized in chloroform/methanol 1/1 (v/v) and extracted twice in the same solvent. After evaporation the lipid residue is dissolved in chloroform/methanol 2/1, filtered and dried to remove most peptidic contaminants. After two cycles, total gangliosides are purified by three successive partitions in chloroform/methanol/phosphate-buffered saline pH 7.40, 1/1/0.7 (v/v/v) and desalting by reverse-phase chromatography on C 18-bonded silica gel. In the case of serum or serum fractions, the procedure is essentially the same but contained only one extraction. Purity of the preparation was controlled by thin-layer chromatography (TLC) on silica gel 60 HPTLC plates (Merck, Paris, France) using a solvent system made of chloroform/methanol/0.2% aqueous CaCl₂. 60/35/8 (v/v/v). Staining is performed with resorcinol HCl. Lipid-bound sialic acid is assayed by the penodate/resorcinol method. The relative proportion of each ganglioside is estimated after resorcinol/HCl by scanning densitometry of the TLC plates on a Shimadzu CS-930 Chromatoscan set at 580 nm.

[2001] Preparation of Lipoproteiin Fractions

[2002] Lipoprotein fractions are prepared from human AB sera by sequential centrifugations. The lipoprotein is fractionated by density-gradient ultracentrifugation in sodium bromide. Sera are first centrifuged at 10,000 g for 20 minutes to remove chylomicrons. Very-low-density lipoprotein (VLDL), low. density lipoprotein (LDL) and high-density lipoprotein (HDL) are floated at respective densities of 1.006, 1.073 and 1.220 g/ml. LDL HDL and the lipoprotein-free fraction (LFF) are extensively dialyzed against phosphate buffer before use to remove sodium bromide and resuspended in phosphate buffered saline in the original volume of serum from which they are extracted. Total serum and the serum lipoprotein fractions are at a final concentration of 10% (v/v).

[2003] Inhibition of Peripheral Blood Mononuclear Cell (PBMC) Proliferation

[2004] PBMC are obtained from the blood of normal donors by Ficoll/Hypaque centrifugation and are washed in medium without serum (RPMI-1640. Gibco. with 1 mM glutamine and penicillin/streptomycin). The culture medium consists of medium without serum, or medium supplemented (10% v/v) with one of the following: total human AB serum, VLDL, LDL, HDL or LFF. Samples containing 1×10⁵ cells are incubated in a final volume of 200 ul (96-well plates, Beckton-Dickinson, Le Pont de Claix, France) in the presence or absence of total tumor gangliosides and one of the following mitogens: phytohemagglutinin (PHA, 1 ug/ml; Sigma. St Louis, Mo.), OKT3 monoclonal antibody (100 ng/ml; Coulter). concanavalin A (0.5 ug/ml; Sigma), interleukin-2 (IL-2, 1000 UI/mI, Roche, France) or 12-O-tetradecanoylphorbol 13-acetate (10 ng/ml: Sigma). After 72 h of incubation, proliferation is assayed by the incorporation of [³H]thymidine (0.5 mCi/well, specific activity 1 mCi/nmol=37 GBq/mmol; C.E.A., Gif-sur-Yvette, France) after an 18-h pulse.

[2005] Screening of Lip-TAAs for Binding to Lip-TAA Binding Proteins

[2006] The extracellular domains of Siglecs or other LipTAA binding agents, e.g., glycolipid transfer proteins (GLTP), prosaposins are cloned into a FLAG-human Fc expression vector (pEDdc). COS-7 cells are transiently transfected at 60-70% confluency using LipofectAMINE Reagent (Life Technologies), in serum-free OptiMEM medium. After 5 h the medium is diluted 2 times with 10% fetal calf serum containing OptiMEM medium and the next day the medium is changed for OptiMEM with 2% fetal calf serum. The COS-7 cell supernatants are collected 5-7 days after transfection. The fusion protein is purified on Protein A-Spharose. Microtiter wells (Nunc) are coated overnight at 4° C. with Protein A (200 ng/well) in 50 mM carbonate/bicarbonate buffer, pH 9.5. Wells are blocked with enzyme-linked immunosorbent assay buffer (20 mM HEPES, 1% bovine serum albumin, 125 mM NaCl, 1 mM EDTA, pH 7.45) for 1 h and incubated with various lipid binding agents (500 ng/well) for 2 h. Between incubations (all at room temperature) wells are washed 3 times with enzyme-linked immunosorbent assay buffer. Lip-TAAs and circulating lipoprotein-bound TAAs are isolated and frationated from tumors and tumor bearing sera as described in Example 59 and below in this section. They are are added for 2 h at various concentrations ranging from 100 ng to 2 ug/well. The plates are washed and biotin-conjugated polyacrylamide substituted with the natural substrates for the individual lipid binding agent are added. In the case of Siglec 5 this is Neu5Acα2-6Gal/β-4Glc, Neu5Acα2-3Galβ1-4Glc, Neu5Acα2-6GalNAcα(sialyl-Tn), and GalNAcα(Tn) (Glycotech). The plates are washed then incubated with alkaline phosphatase-conjugated streptavidin (Life Technologies; 1:1000) for 1 h and development with 100 pl/well of p-nitrophenyl phosphate Liquid Substrate System (Sigma). Plates are read-out at 405 nm.

[2007] Competitive inhibition of binding of the Lip-TAA relative to the natural substate for each lipid binding agent is recorded. Concomitantly, the Lip-TAAs and circulating lipoprotein fractions are tested for their capacity to inhibit mitogen induced T cell proliferation using the methods given below.

[2008] Preparation of Siglecs from cDNAs

[2009] Siglecs 1-7 are isolated by standard recombinant techniques using cDNA for each siglec. cDNAs for the Siglecs are obtained starting with their full length amino acid sequences as given in GenBank. Accession numbers for each Siglec is given below. The first 120 amino acid sequences of mouse Siglec-1 (GenBank accession #Z36293) and human Siglecs 266 (X59350, 4502654, M29273, 4502658, and 4502656, respectively) are used to carry out homology searches of the dbEST division of GenBank database.

[2010] cDNA of Myelin Associated Glycoprotein Sialoadhesin, CD22 & CD33

[2011] Myelin associated glycoprotein (MAG, Siglec 4a) cDNA has been cloned as described by by Arquint M et al., Proc. Natl. Acad. Sci. 84: 600-604 (1987). Sialoadhesin (Siglec 1) cDNA has been cloned by methods given in Crocker P R et al., EMBO J 13: 4490-4503 (1994). The cDNA for the sialoadhesin p75/ARM1 has been cloned (Falco M et al., J. Exp. Med. 190: 793-801 (1999). The cloning of cDNA of CD22 uses methodolgy of Stamenlovic I et al., Nature 345: 74-77 (1990) and Wilson G L et al., J. Exp. Med. 173:137-146 (1991).

[2012] CD33 has been cloned (Cornish A L et al., Blood 92: 2123-2132 (1998). cDNA cloning in the human and mouse shows that CD33 is a type I transmembrane glycoprotein with two Ig-like cxtracellular domains. These domains belong to the V-set and C2-set of Ig-like domains and share sequence similarity with a distinctive subgroup of the Ig superfamily. This consists of the myelin-associated glycoprotein (MAG), the Scbwann cell myelin protein the B-cell antigen CD22, and the macrophage receptor sialoadhesin. All of these Ig-related proteins contain an unusual arrangement of conserved cysteine residues at the NH2 terminus. These are predicted to give rise to an intrasheet disulfide bridge within the V-like domain and an interdomain disulfide bridge between the V- and C2-like domains. In addition, MAG, CD33, and CD22 are closely linked within the genome, mapping within the region of chromosome 19q13.1-13.3 in the human and a syntenic region on chromosome 7 of the mouse

[2013] cDNA of Siglec-5

[2014] By using the amino acid sequence of CD33, a specific homology search was performed against a database containing more than one million expression sequence tags (ESTs) obtained from over 700 different cDNA libraries. A full-length clone in pBluescript II (SK1 encoding one of the CD33-like sequences identified in the search was isolated from a human activated monocyte library and designated pHMQCD 14. A computer search of nucleotide and protein sequence was performed by using the Blast GeneSearch (National Center for Biotechnology Information, National Institutes of Health. Bethesda, Md.). Manipulation of sequences and alignments were performed by using Baylor College of Medicine molecular biology software available on the internet (Human Genome Center, Baylor College of Medicine, Houston, Tex.).

[2015] Preparation of recombinant Siglec-5

[2016] The extracellular region of siglec-5 is amplified by polymerase chain reaction (PCR) with the following forward and reverse primers (5′-3′): (SEQ ID NO:157) ACTCTAGAGTTCGATCTCCCTTGCAGCAG and (SEQ ID NO:158) ACAGATCTGTTCGATCTCCCTTGCAGCAG. The PCR product is cloned in-frame into the pIGplus vector, which encodes a Factor Xa cleavage site between the extracellular region and the hinge region of the Fc portion of human IgGI. Plasmids encoding other Fc-proteins are prepared. To generate recombinant proteins, plasmids are transfected into COS-1 cells by diethylaminoethyl-dextran (DEAE) transfection and Fc-proteins are purified from the conditioned supernatants. Briefly, supernatant is passed over a protein-A Sepharose column, and the bound protein is eluted with 0.1 mol/L glycine pH 3.0 followed by neutralization with 10% vol/vol 1.0 moL/L Tris pH 8.0. The proteins are dialyzed against 20 mmol/L Tris pH 8.0, and the concentrations are estimated by using the bicinchoninic acid (BCA) assay kit (Pierce, Rockford, Ill.) with bovine senim albumin (BSA) as a standard. Fc-proteins are shown to be greater than 95% pure by sodium dodecyl sulfate-polyacrylamide gel electrophoresis (SDS-PAGE) analysis.

[2017] cDNA of Siglec 6 (OB-BP1 and OB-BP2)

[2018] A TF-1 cDNA library is constructed with oligo(dT) priming and cloned into the EcoRI/NotI sites of the retroviral vector pBabe-X-puro, in which the multiple cloning site from pBabe-X are substituted for that of pBabe-puro. The library is packaged in B05C23 cells and then introduced into Ba/F3 cells by retroviral infection. For expression cloning, three rounds of sorting are necessary to isolate a homogenous population positive for rhOB-F staining. Geonmic DNA is extracted from the third sort of the Ba/F3 cells using the Easy DNA kit (Invitrogen). Polymerase chain reaction is performed with Vent polymerase (New England Biolabs) using nested primers designed from the retroviral vector. Another related molecule was cloned from the TF-1 library in pBabe-X-puro by colony hybridization using the OB-BP1 cDNA as a probe. After the initial submission of these sequences to GenBank other reports indicated that OB-BP1 (GenBank accession number U71382) is identical to GDSSL (GenBank accession number D86358) and OB-BP2 (GenBank accession number U71383) is identical to Siglec-5.

[2019] cDNA of Siglec-7

[2020] Since the clone lacked a coding sequence for the first half of an Ig-like domain, 5′-RACE and RT-PCR are performed, using human PBMC total mRNA as a template (PBMC are chosen based on preliminary Northern analysis using the partial clone). RT-PCR is performed using primers based on the DNA sequence of the EST clone and 5′ RACE product. First strand cDNA is synthesized by reverse transcription of 1 ug of PBMC total RNA with random DNA hexamers as primer. The reaction product is subjected to two rounds of PCR using two DNA polymerase (Roche), using SLX-5′UTR (SEQ ID NO:159) (5′-CTCG-GATCCCTGGCACCTCTAACCC-3′) and SLX-3′UTR (SEQ ID NO:160) (5′-GGTCTAGAACCCTCAAACAAGCCC-3′) as primers. The PCR products are digested with BamHI and XbaI. ligated to BamHI-XbaI sites of pBluescript II KS(−) (Stratagene) and sequenced. A point mutation converting an Arg residue (R124) to Lys is introduced using QuickChange Site-Directed Mutagenesis Kit (Stratagene), following the manufacturer's protocol. A human 12-lane Multiple Tissue Northern Blot is probed with the NcoI-XhoI fragment of the EST clone labeled with the Strip-EZ DNA kit (Ambion) and [α-³²]dATP (NEN). Hybridization signals are visualized using a Phosphor Imager.

[2021] The full-length clone contains an open reading frame encoding 374 amino acids, starting with a typical signal sequence and two Ig-like domains, followed by a probable transmembrane domain and cytosolic tail. The cytosolic tail of the full-length protein contains two tyrosine residues, of which the first is contained in an Immunoreceptor Tyrosine-based Inhibitory Motif (ITIM; S/I/L/VxYxxL/V). The second is in a motif [NEYSBI] similar, but not identical to the binding site on SLAM (Signaling Lymphocyte Activating Molecule) for SLAM-associated protein (SAP). Nucleotide identity with other human Siglecs (first 750 nucleotides) are: Siglec-1, 45.9%; Siglec-2, 48.0%; Siglec-3, 63.6%; Siglec-4, 45.4%; Siglec-5, 64.0%; Siglec-6, 63.0% and many of the residues typical of the Siglecs are conserved. Siglec-7 forms a closely related cluster with Siglecs 3, 5, and 6.

[2022] Prosaposin & Saposin: Purification Procedure

[2023] Purified prosaposin and saposins are prepared from their respective cDNAs (O'Brian et al Science) using standard recombinant techniques.

[2024] Prosaposin is purified from the spent media of Spodoptera frugiperda (Sf9) cells infected with a baculovirus expression vector (pAC 610) containing a full-length cDNA for human prosaposin as described by Hiraiwa M et al., FASEB J. 6: 969 (1990). Purification steps included column chromatography on Con A-Sepharose and reverse-phase HPLC on a C4 column. The purity of the final purified preparation is assessed by SDS/PAGE, immunoblotting, and N-terminal analysis. Naturally occurring prosaposin is also isolated by the same method from human seminal plasma.

[2025] Saposins A, C, and D are all isolated in pure form from the spleen of a patient with Gaucher disease as described by Morimoto S et al., Anal. Biochem 190:154-157 (1990). Saposin B is purified from a heat-treated extract of Gaucher disease spleen by a slightly modified procedure involving reverse-phase BPLC on a C4 column and isoelectric focusing with the Rotofor cell. Each purified protein gives a single band on SDS/PAGE, and no cross-contamination of one saposin with another is detected after immunoblotting using monospecific antibodies against saposins A, B, C, and D, respectively.

[2026] Glycolipid Transfer Protein (GLTP): Purification Procedure

[2027] Purified GLTP is isolated and prepared from GLTP cDNA (GTP cDNA) by the method of Lin et al., J. Biol. Chem. 275:5104-5110 (2000) using standard recombinant techniques.

[2028] The method of Sasaki T et al., Methods in Enzymology 179: 559-567 (1989) is used to purify GLTP to homogeneity with a yield of 19%. The data presented derive from the processing of 3,950 g of pig brain (44 brains).

[2029] Step 1: Postmitochondrial Supernatant. Fresh pig brains are stored at −20° thin blocks after removal of pia mater. Frozen brains (4,000 g) are partly thawed by allowing to stand at 20° for 1 hr and then cut in small pieces, after which all manipulations are performed at 4°, A 30% homogenate in buffer A is prepared by homogenizing with a Waring blendor for 1.5 mm at high speed. The mixture is centrifuged at 8,700 g for 30 mm. The pellet is reextracted by stirring with 10 liters of buffer A. Phenylmethylsulfonyl fluoride (PMSF), 0.2 M in 2-propanol, is added to the postmitochondrial supernatant to a final concentration of 0.5 mM.

[2030] Step 2: Ammonium Sulfate Precipitation. Ammonium sulfate is added to the postmitochondrial supernatant to 35% saturation (19.4 g/100 ml). After stirring for 1 hr, the precipitate is removed by centrifugation at 8,700 g for 40 mm. The supernatant is adjusted to 70% saturation with ammonium sulfate (21.8 g/100 ml) to precipitate GLTP. After allowing to stand overnight, the clear supernatant above the thick precipitate is siphoned off by the use of a tube. The precipitate is collected by centrifugation (8,700 g for 30 mm), dissolved in 200 ml of buffer C, divided into three dialysis bags (4 cm flat diameter), and dialyzed for 2 days against 7 times 4 liters of buffer C. After addition of PMSF to 0.5 mM the dialysate is centrifuged at 100,000 g for 2 hr to obtain a membrane-free solution.

[2031] Step 3: First Phosphocellulose Chromatography. The supematant is diluted to 670 ml with buffer C and appplied to a column (7×25 cm) of phosphocellulose (Whatman P11) in buffer C at a flow rate of 100 ml/hr. Unbound protein is eluted by rinsing the column with 5 liters of buffer C. The transfer activity is eluted with 2 liters of 0.3 M sodium chloride in buffer C. PMSF is added to the effluent at 0.5 mM.

[2032] Step 4: Chromatography on CM-Cellulose. Protein is precipitated from the effluent with ammonium sulfate added to 90% saturation (60.3 g/100 ml), left overnight, and collected by centrifugation at 33,000 g for 10 mm. The pellets are dissolved in 90 ml of buffer C and dialyzed against 4 times 1 liter of buffer C. The dialysate is centrifuged at 100,000 g for 30 mm to remove a small amount of insoluble material. The supernatant is applied to a column (2.7 )<45 cm) of CM-cellulose (Whatman CM-52 microgranular) equilibrated with buffer C. The column is rinsed with 1.4 liter of buffer C to elute unbound protein. The elution is continued with a 1.6-liter linear gradient of sodium chloride from 0 to 0.2 M in buffer C at a flow rate of 37 ml/hr. Fractions of 17 ml each are collected, and 50-ul aliquots are assayed. A major peak of transfer activity appears in the effluent at about 55 mM sodium chloride, but some transfer activity is eluted before the main peak. Fractions of the major activity peak with an activity of 0.14 nmol of [³H]galactosylceramide transferred/50 ul/30 mm are pooled, and PMSF is added to 0.5 mM.

[2033] Step 5: Fractionation on Sephadex G75: Protein is precipitated from the pooled fractions with ammonium sulfate (65 g/t00 ml), left overnight, and collected by centrifugation at 25,000 g for 15 mm. The pellets are dissolved in 7 ml of buffer B and dialyzed against 5 times 300 ml of this buffer. The dialysate is centrifuged at 100,000 g for 90 mm, and the supernatant is applied to a column (2×140 cm) of Sephadex G-75 (fine, Pharmacia). Protein is eluted with buffer B at a flow rate of 39 ml/hr. Fractions of 4 ml each are collected, and 1S-₄ul aliquots are assayed. Transfer activity appears at VJV₃=1.84. Fractions with an activity of 0.17 nmol of [³H]galactosylceramide transferred/15 ul/30 mm are pooled.

[2034] Step 6: Chromatography on Phenyl-Sepharose. Sodium chloride is added to the pooled fractions to 3 M, which is then applied at a flow rate of 48 ml/hr to a column (2×19 cm) of Phenyl-Sepharose CL-4B (Pharmacia) equilibrated with buffer E containing 3 M sodium chloride. The column is rinsed with 220 ml of buffer E containing 3 M sodium chloride and 775 ml of buffer E. The transfer activity is eluted with 250 ml of 50% (v/v) ethylene glycol in buffer E. Fractions of 4.3 ml each are collected, and 2-ul aliquots are assayed. Fractions with an activity of 0.03 nmol of [³H]galactosylceramide transferred/2 ul/30 mm are pooled. Extensive washing of the column with buffer E elutes a portion of the transfer activity. Therefore, it is important to determine the proper time to switch from buffer E to 50% (v/v) ethylene glycol in buffer E.

[2035] Step 7. Second Phosphocellulose Chromatography The pooled fractions are diluted 2-fold with buffer D and then applied to a column (1.4×15 cm) of phosphocellulose (Whatman P11), which has been extensively washed and equilibrated with buffer D. The column is rinsed with 180 ml of buffer D. The elution is continued with a 200-ml linear gradient of sodium chloride from 0 to 0.2 M in buffer D at a flow rate of 20 ml/hr. Fractions of 3.4 ml each are collected, and 2-ul aliquots are assayed. Most of the transfer activity and protein are eluted in a single peak at about 93 mM sodium chloride. GLTP in this peak is homogeneous and has a specific activity of 40.6 nmol/min/mg protein under the conditions of [³H]galactosylceramide transfer assay and of 140 mmol/min/mg protein under the conditions of PyrGalCer transfer assay. A small amount of the transfer activity is eluted as a separate peak after the elution of the major peak. The purity of GLTP in the second peak varies depending on the extent of rinsing with buffer E in Step 6. No difference has been found in the properties of GLTP in the first and second peaks.

[2036] In vivo Use of Lip-TAA Binding Proteins

[2037] Tumor models given in Examples 18, 20-23 are used. Lip-TAA receptor mimic and Lip-TAA receptor antisense constructs are injected in doses of 0.05 to 50 ug in 0.1-0.5 ml of normal saline on days 3, 5 ,7, and 9 after the day of subcutaneous tumor implantation or intravenous injection of tumor to establish pulmonary metastases. Control animals are injected with PBS on the same schedule. The diameters of tumors are measured daily with calipers. The sizes of the tumor are expressed as the products of the longest diameter times the shortest diameter (in mm²). On day 21, the mice are killed and either primary tumors measured or metastatic pulmonary nodules counted. Unless indicated otherwise above, treatments are given one to three times per week. The results shown in Example 21 (Table VI) are for each composition and dose tested. The results are statistically significant by the Wilcoxon rank sum test. The other models given in Example 20 are also suitable for evaluation of the therapeutic effectiveness of the effector T cells.

[2038] Adoptive Therapy of Tumors in Humans Using Lip-TAA Receptor Depleted Immunocytes or Antigen Presenting Cells

[2039] Eligible patients are treated with tumor antigens such as irradiated tumor cells or GM-CSF transduced tumor cells injected approximately 10 centimeters from a draining lymph node site. Ten days post injection, draining lymph nodes are obtained in a limited surgical procedure at the site draining the injection. The lymph nodes are converted to a single cell suspension of lymphocytes. These lymphocytes are depleted of ganglioside receptors by methods given above. They are then incubated with various SAg preparations for two days followed by IL-2 for an additional 72 hours. These lymphocytes now called effector T cells or NKT cell are used for adoptive immunotherapy. Effector immunocytes are harvested by centrifugation at 500×g for 15 mm and the cell pellets are pooled. After washing the cells in HBSS, the cell are resuspended in 200 ml of normal saline containing 5% human serum albumin and 450,000 IU of IL-2 for transfer. Each recipient will receives four escalating doses or 33 million, 100 million, 330 million and 1 billion cells per square meter of body surface area each given one week apart. Cells are infused through a subclavian central venous catheter over a 30-minute interval. IL-2 administration iv. is optional and if used is generally commenced shortly after completion of cell infusion at a dose and schedule of 180,000 IU/mI every 8 h. for 5 days. All patients receive indomethacin (50 mg P.O.) every 8 h, acetaminophen (650 mg P.O.) every 6 h. and ranitidine (150 mg P.O.) every 12 h while receiving IL-2 in order to reduce febrile and gastric side effects. As controls, a cohort of patients is treated with the in vivo tumor vaccination step and IL-2 without the tumor effector cells. Patients are followed for clinical response every 4 weeks for 2 months with repeat radiological examinations. Results are given in Example 23 (Table VIII).

### EXAMPLE 59

[2040] Preparation and Use of Lip-TAA Receptor Mimics for Inactivation of Lip-TAAs in Tumor Bearing Hosts

[2041] Lip-TAA Isolation

[2042] The cellular gangliosides are isolated from FBL-3 tumor cells which are pelleted lyophilized, and extracted twice with chloroform-methanol (1:1). The total lipid extract was taken to dryness. Gangliosides are purified by partitioning the dried total lipids in diisopropylether/1-butanol/0.1% aqueous NaCl. The lyophilized final aqueous phase is dissolved in a small volume of water, after which Sephadex G-50 gel exclusion chromatography is used to remove salt and low m.w. impurities from the ganglioside fraction. Gangliosides are quantified as nanomols of lipid-bound sialic acid by a modified colorimetric resorcinol assay. Analysis of gangliosides is performed using 10-×20-cm precoated Silica Gel 60 high performance TLC plates. The plates are developed in chloroform-methanol. 0.25% aqueous CaCI₂-H₂O (60:40:9). Gangliosides are visualized as purple bands with resorcinol-HCl.

[2043] High Performance Liquid Chromatographic Purification of Lip-TAA

[2044] Lip-TAAs are purified by normal phase HPLC. Briefly, 800 nmol lipid-bound sialic acid (LBSA) of FBL-3 cell gangliosides in 100 ul HPLC water are chromatographed with a Perkin-Elmer (Norwalk, Conn.) HPLC system, on a LiChrosorb-NH₂ column (250 mm long, 10 mm inside diameter, Merck, Germany). The separation is conducted at ambient temperature with a solvent gradient program described by Gazzotti et al. (27). The eluting solvent system is composed of acetonitrile-5 mM Sorensen's phosphate buffer (83:17), pH 5.6 (solvent A), and acetonitrile-20 mM Sorensen's phosphate buffer (1:1), pH 5.6 (solvent B). The gradient elution program of 80 mm, at a flow rate of 6.25 ml/mm, is as follows: 100% of solvent A for 7 mm, then a linear gradient from 100% solvent A to solvent A-solvent B (66:34) over 53 mm, and then a linear gradient from solvent A-solvent B (66:34) to solvent A-solvent B (36:64) over 20 mm. The elution profile is monitored by flow-through detection of UV absorbance at 215 nm. The isolated gangliosides are lyophilized, dissolved in a small volume of distilled water, desalted by Sephadex G-50 gel exclusion chromatography, and lyophilized.

[2045] Mass Spectrometric Analysis

[2046] The carbohydrate structure of TGGs is characterized by negative-ion fast atom bombardment mass spectrometry (FAB-MS). Ceramide structures are elucidated by negative ion FAB collisionally activated dissociation tandem MS (FAB CAD-MSIMS) without prior derivatization using linked scans. Approximately 1 ul of ganglioside-methanol solution is mixed with 2 ul of triethanolamine (matrix) on the FAB probe tip. Ions are formed by bombardment with a 6-keV beam of xenon atoms in a JEOL HX-110 double-focusing mass spectrometer. For analysis of the ceramide structure by FAB CAD-MS/MS the [cerO]⁻ fragment ion is selected as the precursor ion. Helium is used as the collision gas, and the helium pressure is adjusted to reduce the abundance of the precursor by 75%. A JEOL DA-500 data system generated the linked scans.

[2047] Lip-TAA Shedding

[2048] FBL-3 tumor cells are metabolically labeled by culture for 48 h in RPMI 1640 medium containing 10 MCi each of D-[I-¹⁴C]glucosamine hydrochloride and D-[I-¹⁴C]galactose, after which the cells are washed three times in RPMI medium and resuspended at 2.0×10⁶ cells/ml in three 25-cm² tissue culture flasks. The supernatant and the cells from the same flask are harvested 24 h after the cells are resuspended. The gangliosides present in the cells and in the supematant are then purified. The radiolabeled gangliosides are quantified by p-scintillation counting of the ganglioside-associated radioactivity, and equal aliquots of radiolabeled gangliosides are qualitatively analyzed by high performance TLC (HPTLC) autoradiography (29) with radiolabeled rat brain gangliosides as standards.

### EXAMPLE 60

[2049] Construction of Adenovirus Vectors with Insertions for Superantigens

[2050] Superantigens are inserted into human adenoviruses (Ads) which are used as live viral vector for expression of superantigens in mammalian cells. Adenoviruses vectors are exemplified here for insertion of the superantigen nucleotide. A mutant adenovirus with selectivity for P53 deficient tumors is preferred such as ONYX-015. An efficient and flexible system for construction of adenoviral vector with insertions or deletions in early regions 1 and 3 as described by Bett A J et al., Proc. Natl. Acad. Sci. 91: 8802-8806 (1994) is given below. Similar procedures insertion of the superantigen gene would be applied to the ONYX-014 mutant.

[2051] Principle of Method

[2052] Superantigen genes are inserted into adenoviral vectors using the following principles and methods adapted from Bett, A J et al., Proc. Nat. Acad. Sci. 91: 8802-8806 (1994).

[2053] Additional methods are given in a book titled Adenovirus Methods and Protocols Wold, W S M ed. Humana Press, Totowa, N.J. (1999) which is incorporated in entirety by reference. These methods involve insertion of the superantigen DNA either by overlap recombination or by ligation insertion. The method exemplified below for insertion of SAg sequences uses the Ad5DNA virus but may be adapted to the dl1150 or ONYX-015 mutant or any other adenovirus. The AdS DNA sequences are cloned into into bacterial plasmids. Deletions are made in the early region 1 and(3180 bp) and early region 3 (2690 or 3132 bp) and are combined in a single vector that have a capacity for inserts of up to 8.3 kb, enough to accommodate the majority of cDNAs encding proteins with regulatory elements. SAg genes are inserted into either early region 1 or 3 or both and mutations or deletions are readily introduced into the viral genome.

[2054] SAg genes may be inserted into areas of the viral genome that have been inactivated or deleted and considered to be non-essential to the lytic activity of the virus or its ability to evade the host immune response. Both Ad and HSV carry genes that are not essential for viral replication and these may be utilized for SAg insertion.

[2055] The first step is the construction of AdBHG, a virus that contains the Ad5 genome with the deletion of E3 sequences from bp 28,133 to 30,818 and the insertion of a restriction enzyme site. The next step is the the generation of a bacterial plasmid containing the entire AdBHG genome and subsequent identification of infectious clones. Baby rat kidney (BRK) cells are infected with AdBHG under conditions that result in the generation of circular AdS genomes. At 48h after infection, DNA is extracted from the infected BRk cells and used to transform E. Coli HMS174 to ampicillin and tetracycline resistance. Plasmids with the complete ADBHG genome are selected. The final step is the generation of the pBHG10 by deleting the packaging signals in pBHG9 by partial BamHI digestion and religation. A Pac I restriction enayme site unique to this plasmid is present between Ad5 bp 28,133 and bp 30,818 to permit foreign gene insertion. Because the packaging signal is deleted, pBHG10 is non-infectious but cotransfections with plasmids that contain the left-end Ad5 sequences including the packaging signal produce infectious viral vectors with an efficiency comparable to that obtained with pJM17.

[2056] Use of the pBHGE3, pBHG10, or pBHG11 combined with the 3.2-kb deletion in E1permits superantigen DNA inserts of ˜5.2, ˜7.9, and ˜8.3. respecitvely, into viral vectors. To test the capacity of the BHG system, a 7.8 kb consisting of the lacZ gene driven by the HCM promoter (E1-antiparallel orientation) and the SEB gene driven by the beta actin promoter (E1-parallel orientation) are inserted into the 3.2-kb E1 deletion. The 7.8-kb insert is constructed by inserting the 4.1-kb Xba I fragment from the SEB gene containing the SEB gene driven by the beta actin promoter into the Xba I site in pHCMVsp1LacZ generating pHlacSEB. The isolate pHlacSEB expressed both lacZ and SEB at levels comparable to those obtained with vectors containing single inserts.

[2057] The Method

[2058] The first step involves the construction of ADBHG, a virus that contains the Ad5 genome with the deletion of E3 sequences from bp 28,133 to 30,818 and the insertion of modified pBR322 at bp 1339. AdBHG is made by cotransfection of 293 cells with purified viral DNA from Ad5PacI, digested with Cia I and Xba I, and pWH3.

[2059] The next step involves the generation of a bacterial plasmid containing the entire AdBHG genome and subsequent identification of infectious clones. Baby rat kidney (BRK) cells are infected with AdBHG under conditions that result in the generation of circular Ad5 genomes. At 48 h after infection DNA is extracted from the infected BRK cells and used to transform E. coli HMS 174 to ampicillin and tetracycline resistance (Apr and Tetr, respectively). From two experiments, plasmid DNA from a total of 104 colonies is screened by HindIII and BamHI/Sma I digestion and gel electrophoresis. Plasmids that appear to posses a complete AdBHG genome are selected and all four are found to be infectious when transfected into 293 cells.

[2060] The final step involves generation of pBHG10 by deleting the packaging signals in pBHG9 by partial BamHI digestion and religation. The left and right termini of the Ad5 genomes are covalently joined and a segment of plasmid pBR322 is present between AdS bp 188 and 1339 to allow propagation of pBHG10 in E. coli. A Pac I restriction enzyme site, unique in this plasmid, is present between AdS bp 28,133 and bp 30,818 to permit insertion of the superantigen genes. Because the packaging signal is deleted, pBHG10 is noninfectious but cotransfections with plasmids that contain the left-end AdS sequences including the packaging signal produce infectious viral vectors with an efficiency comparable to that obtained with pJM17.

[2061] To generate two useful variants, pBHGE3 and pBHG11 are constructed from the original plasmid pBHG10. pBHGE3 permits construction of vectors with wt E3 sequences and pBHG11 increase the cloning capacity of resulting viral vectors. The 2.69-kb E3 deletion in pBHG10 removes the major portions of all E3 mRNAs, the first E3 3′ splice acceptor site, and the L4 polyadenylylation site but leaves the E3 promoter, the 5′ initiation site, the first E3 5′ splice donor site, and the E3b polyadenylylation site intact. Viruses with the 2.69-kb E3 deletion have the same growth kinetics and progeny virus yields as wt virus. The 3.1-kb E3 deletion in pBHG11 removes two additional elements not removed by the 2.69-kb E3 deletion: the first E3 5′ splice donor site and the E3b polyadenylylation site. This deletion does not interfere with the open reading frame for pVIII or any of the L5 family of mRNAs. Viruses containing the 3.1-kb deletion give wt progeny yields in infected 293 cells.

[2062] To maximize the capacity of the BHG system and to facilitate the introduction of inserts such as the SEB gene into the E1 region, plasmids containing a 3.2-kb deletion of E1 sequences and multiple restriction sites for the insertion of foreign genes have been constructed. This deletion leaves intact the left ITR and packaging signals and extends just past the Spi binding site of the protein IX promoter. The promoter for transcription of the protein IX gene is relatively simple, consisting of this Spi binding site and a TATA box.

[2063] The Spi binding site is essential for expression of protein IX and it is therefore, reintroduced at a position 1 bp closer to the TATA box than in the wt promoter. However, neither the original 3.2-kb E1 deletion nor the deletion mutants containing the synthetic Spi site are significantly altered in protein IX expression, heat stability or final progeny yields of viruses with this deletion.

[2064] General Treatment Plan for Patients with the SAg-dl1150 Construct

[2065] SAg-dl1150 is administered intratumorally to patients with recurrent and refractory cancers. The efficacy of SAg-dl1150 treatment is based on the injected tumor(s) response. The clinical benefit of SAg-dl1150 is evaluated through quality-of-life assessment (EORTC instrument), Kamofsky performance score, and pain assessment. Survival and progression-free survival intervals are recorded. Results are given in Example 23 (Table VIII).

[2066] SAg-dl1150 Dosages and Dosing Rationale

[2067] Patients are treated with SAg-dl1150 administered daily for 5 d at a dose of 10¹⁰ pfu per day. This is the highest dose administered daily for 5 d in the phase I study and was shown to be safe (i.e., no dose-limiting toxicities).

[2068] Treatment with SAg-dl1150

[2069] a. Dosing Regimen: For administration of each dose of, patients are treated and observed in a properly equipped outpatient clinic. The target tumor is injected with 10¹⁰ PFU of SAg-dl1150 daily over 5 d (i.e., a total dose 5×10¹⁰ PFU) (with day 1 being the first day of SAg-dl1150 injection. Nontarget tumor(s) (where applicable) are injected with either diluent or SAg-dl1150 on the same days in identical fashion to the target tumor following the guidelines detailed in steps below.

[2070] b. Target Tumor Masses: The dominant, symptom-causing tumor (if symptoms are present) is identified as the target tumor and is the only tumor injected with SAg-dl1150 during the first two treatment cycles. The identification of the most symptomatic, problematic lesion is based on the judgement of the Principal Investigator. Multinodular, but contiguous tumors are treated and evaluated as a single lesion.

[2071] C. Secondary, Nontarget Tumor Masses: If additional, smaller, accessible lesions are present, these lesions are injected with diluent for the first two treatment cycles as described in step 3 below. Thereafter, treatments are divided between up to three separate lesions (i.e., the initial two cycles are concentrated within the dominant lesion; thereafter, 6 wk after treatment initiation, two additional secondary lesions are injected). However, the total dose to the patient remains the same (i.e., the same total dose will be divided up between the tumors to be treated); the total volume in which the SAg-dl1150 is suspended will be increased based on the total tumor volume of the tumors to be treated. If a CR occurs in a treated lesion, injections can be continued as outlined above with newly defined dominant and secondary lesions.

[2072] d. Immediate Posttreatment Monitoring of Patients: The patient's vital signs are taken ≦15 mm before each SAg-dl1150 injection. After each injection is completed, the patient will be observed in the clinic for a minimum of 30 mm. Vital signs are taken after 30 min±5 mm. If vital sign(s) have changed by >15%, vital signs will be repeated every 30 mm until returning to within baseline 15% of baseline values. Following the observation period, the patient is sent home or hospitalized overnight at the discretion of the investigator. Results are given in Example 23 (Table VIII).

[2073] Plasmid Superantigen-HPV E7 Constructs

[2074] The method of Chen C H et al., Cancer Res. 60 1035-1042 (2000) is used. A DNA fragment encoding SEB is prepared as described in Example 1 and Dow SW et al., J. Clin. Invest. 101: 2406-1414 (1998). Briefly, the genes for SEA and SEB and the pHBNeo beta actin promoter which are to be inserted into the BHG system at multiple restriction sites are described in Example 1 Additionally the SEB and SEA genes are obtained from Dr. John Kappler (National Jewish Hospital), and the gene for TSST-1 are obtained from Dr. Brian Kotzin (National Jewish Hospital). After PCR amplification, all three genes are subcloned into a eukaryotic expression vector (PCR3; Invitrogen Corp., San Diego, Calif.).

[2075] The primers used for cloning SEA were (forward): (SEQ ID NO:21) GGGAATTCCATGGAGAGTCAACCAG; (backward): (SEQ ID NO:22) GCAAGCTTAACTTGTTAATAG; for SEB (forward): (SEQ ID NO:23) GGGAATTCCATGGAGAAAAGCG; (backward): (SEQ ID NO:24) GCGGATCCTCACTTTTTCTTTG; for TSST-1 (forward): (SEQ ID NO:25) CGGGGTACCCCGAAGGAGGAAAAAAAAATGTCTACAAACGATAAT ATAAAG; (backward): (SEQ ID NO:26) TGCTCTAGAGCATTAATTAATTTCTGCTTCTATAGTTTTTAT. The full-length TSST-1 gene is cloned into PCR3, whereas only the mature SEB and SEA genes (minus the putative bacterial signal sequences) are cloned into PCR3. Removal of the SEB and SEA signal sequences increased the level of gene expression in transfected cells (data not shown). The plasmids are grown in Escherichia coli, and plasmid DNA used for recombination in the adenoviral constructs are extracted by modified alkaline lysis method and purified on a CsCl gradient.For the generation of SEB-expressing plasmid, (pcDNA-SEB) the SEB was subcloned into the unique BamHI and Hinlll cloning sites of the pcDNA3. 1(−) expression vector (Invitogen, Carlsbad, Calif.) downstream of the cytomegalovirus promoter. For the generation of HPV-16 E7-expressing plasmid (pcDNA3-E7), E7 DNA is amplified by PCR using primers designed to generate BamHI and Hindlll restriction sites as the 5′ and 3′ ends of the amplified fragments, respectively. The amplified E7 DNA is then cloned into the unique BamHI and Hindlll cloning sites of the pcDNA3.1. For the generation of E7-SEB chimera (pcDNA-E7-SEB), E7 DNA is amplified by PCR using primers designed to generate BamHI restriction sites at both 5′ and 3′ ends of the amplified fragments. The E7 DNA is then subcloned to the 5′ end of pcDNA3-SEB. The accuracy of these constructs is confinned by DNA sequencing. Plasmid DNA with SEB, E7, or E7-SEB gene insert and the “empty” plasmid vector are transfected into subcloning efficient DH5 (TM cells; Life Technologies). The DNA is then amplified and purified using double cesium chloride purification (BioServe Biotechnologies, Laurel, Md.). The integrity of plasmid DNA and the absence of Escherichia coli DNA or RNA are checked in each preparation using 1% agarose gel electrophoresis. DNA concentration os determined by the absorbance measured at 260 run. The presence of the inserted E7 fragment is confirmed by restriction enzyme digestion and gel electrophoresis.

[2076] DNA Vaccination

[2077] Gene gun particle-mediated DNA vaccination was performed using a helium-driven gene gun (Bio-Rad. Hercules, Calif.) according to the protocol provided by the manufacturer. Briefly, DNA-coated gold particles were prepared by combining 25 mg of 1.6-m of gold microcartiers (Bio-Rad, Hercules, Calif.) and 100 M¹ of 0.05 Ni spermidine (Sigma, St, Louis, Mo.). Need to house this chimeric plasmid construct in a viral vector which can transport the chimeric DNA into tumor cellsfor transport selectively to tumor cells

[2078] Generation of Dendritic Cells Exposed to Necrotic Tumor Cells Transfected with SAg Genes

[2079] DCs are generated from blood monocyte precursors as follows. Briefly, mononuclear cells are plated in 6-well culture plates at 8×10⁶ cells per well and allowed to adhere to plastic for 2 hours. Plastic adherent cells are cultured in RPMI-1640 (BioWhittaker, Walkersville, Md., USA) supplemented with 1% autologous plasma, 20 ug/ml gentamicin (clinical grade; Fujisawa USA, Deerfield, Ill., USA), 800 U/mL GMP grade IL-4 (Cell Genix, Freiburg, Germany), and 100 IU/mL clinical grade GM-CSF (Immunex, Seatde, Washington, USA) for 7 days. Cultures are supplemented with cytokines on days 2, 4, and 6. On day 7, cells are transferred to new plates and cultured in the presence of 50% (vol/vol) monocyte-conditioned medium (MCM) for 2 additional days. Using this methodology, 1.5×10⁶ to 4 ×10⁶ mature DCs expressing high levels of CD86, CD83, and HLA-DR, and lacking other lineage markers (e.g., CD14), are reproducibly generated from 80 ml of peripheral blood. MCM is prepared by adhering 50×10⁶ PBMCs in 7 ml of 1% autologous plasma to plates precoated with 100 ug/mL human IgG (Bayer Corp., Elkhart, Ind., USA) for 90 minutes. The PBMCs are harvested after overnight culture of adherent cells and are filtered and frozen at −20° before use. Mature DCs generated using this methodology are potent stimulators in mixed lymphocyte reaction at T/DC ratios of 900:1.

[2080] Injection of SAg-Tumor Antigen Pulsed Dendritic Cells

[2081] Antigens are added to DCs overnight 1 day before injection. On the day of injection (i.e., day 9 or 10 of culture), the DCs are washed free of antigen and resuspended in normal saline containing 0.5% autologous plasma in two 0.2 ml aliquots. Phenotype and purity of injected DCs are monitored by the expression of the DC maturation-associated marker CD83 by flow cytometty. DCs are injected as a superficial subcutaneous injection in 2 adjacent sites on the upper inner arm, ˜4 inches from the axilla. All injected DC preparations test negative for bacterial and fungal contamination. All subjects are observed overnight. Results are given in Example 23 (Table VIII).

[2082] Viral Vector Containing Superantigen and IκB_α Nucleic Acids

[2083] The super-repressor IkBa and superantigen nucleotides were cloned into the replication-deficient Ad5 vector with transgene expression driven by the CMV pormoter. The replication deficient Ad.CMV3 containing the superantigen and super-repressor IkBa was used ot produce stably transfected HT10801 cells. The cells were pre-infected with Ad.CMV IkB_a; or Ad.CMV3 empty control vector for 1 h.

[2084] In vivo Tumor Model With Ad.CMV IκB_α and TNF Treatment

[2085] HT10801 cells (1×10⁶ cells/0.1 ml) or control HT1080V cell suspensions are injected subcutaneously into each flank of female, athymic, nu/nu mice 5-6 weeks old (Taconic, Germantown, N.Y.). Tumors are allowed to develop for 21 d and then were injected with TNFα; (10 ug/100 ul in PBS once a day for 3 d). Both maximum and minimum diameters of resulting tumor are measured over the skin every 2 days using a slide caliper. Tumor cells (1×10⁶) were injected subcutaneously in the flanks of nu/nu, female, athymic nude mice 5-6 weeks old (body weight, 18-20 g). Tumors are treated 2-3 weeks after cancer cells are injected when tumor dimensions were approximately 1 cm×1 cm. Tumor treatment involved the intratumoral injection of recombinant adenovirus Ad.CMVIκBα. Virus (1×10¹⁰ PFU, diluted in a total of 200 ul of PBS) is administered in a single pass of a 27-gauge hypodermic needle. A second virus injection was given 7 d after the first. The recombinant adenovirus Ad.CMV3 and vehicle alone are used as controls. CPT-11 (Irinotecan; Pharmacia & Upjohn Company, Kalamazoo, Mich.) was administered by tail vein injection at a dose of 33 mg/kg in 100 ul every 4 d beginning 24 h after the first viral injection. A total of five doses of CPT-11 are given. PBS (100 ul) administered by tail vein injection was used as a control for drug treatment. Tumor diameter is measured along the longest orthogonal axes every other day after treatment was initiated, and recorded as tumor volume. Tumor volume is calculated by assuming a spherical shape, using the formula (volume=4/3 IIr²), where r=1/2 (mean tumor diameter measured in two dimensions). Tumors are fixed in 10% formalin and embedded in paraffin blocks. Paraffin-embedded sections are pre-treated with dewax and rehydrated (55° C. for 15 mm), then washed in xylene and rehydrated through a graded series of ethanol and redistilled water. Tissue sections were then incubated with proteinase K (20 μg/ul in 10 mM Tris/HCI, pH 7.4-8.0, for 15 mm at 21-37° C.), permeabilized in 0.1% Triton-X100 in 0.1% sodium citrate, and then labeled with the TUNEL reaction mixture (Boehringer). Results are given in Example 21 (Table VI).

[2086] Therapeutic Model

[2087] The therapeutic efficacy of SAg-dl1520 construct is determined in vivo by growing p53-C33A cells and p53+ U87 human glioblastoma multiforme cells as tumor xenografts in athymic mice. The tumor cells are injected subcutaneously into each flank of each mouse, and after establishment of palpable tumors (mean tumor volume 150 μl), the tumors are directly injected with CsCl-purified wild-type adenovirus, with SAg-dl1520. dl1520 or ultraviolet (UV)-inactivated wild-type virus as a negative control every other day for three total doses. Tumor growth is followed for 6 weeks, at which time the mean tumor volume in each group are determined. Treatment of C33A tumors with superantigen-dl1520 results in a 100% reduction in mean tumor volume as compared with dl1520 cells or wild type UV inactivated adenovirus (unpaired two tailed test: P=0.02).In contrast, dl1520-injected p53+ U87 tumors are comparable in size to control-injected tumors after 6 weeks, although shrinkage is seen in some cases.

[2088] Construction of Plasmids Encoding SAg Self Replicating RNA (pRep-SAg)

[2089] pRep-SAg was constructed by replacing the LacZ fragment in pRep-LacZ with SAg fragment from the plasmid PHBNeo-SEB or by using the plasmids developed by Dow as in the above section on viral DNA. pRep^{del}-LacZ was created by cleavage of the Rep-LacZ plasmid with Xhol and Bglll (creating a 1407-bp deletion) which was then end-filled and self-ligated.

[2090] The plasmid SFV3-LacZ contains a SP6 promoter, a 7-kb fragment encoding the SFV RNA replicase, and a subgenomic promoter that is bound by the RNA replicase to synthesize large quantity of subgenomic RNA. The LacZ gene was located in the 5′ region of the subgenomic promoter. The plasmid pRep-LacZ was constructed by inserting an Sphl fragment containing the CMV immediate early promoter/enhancer into the Sphl site of SFV3-LacZ (Life Technologies). The CMV promoter/enhancer fragment was inserted so that the resulting plasmid could potentially be used for DNA immunization studies similar to those reported. An additional Spel site was inserted 5′ of the 5P6 promoter together with the CMV promoter/enhancer fragment. Digestion of the plasmid with Spel generates a DNA fragment that contains only the SFV RNA replicase and B-gal coding sequences without sequences encoding ampicillin-resistant plactamase, which is used as the template for in vitro transcription of Rep-LacZ RNA. The primers used for generating a PCR fragment containing the CMV promoter/enhancer from pCR3.1 plasmid (Invitrogen, Carlsbad, Calif.) were: 5′ primer, (SEQ ID NO:161) 5′-ACATGCATGCACTAGTGCGCGCGTTGACATTGATTA-3′ (Spel site (underlined) added for subsequent linearization) and 3′ primer, (SEQ ID NO:162) 5′-ACATG-CATCCATGTGAGAGCTCTGCTTATATAGACC-3′.

[2091] Intravenous Tumor Model

[2092] BALB/c mice are immunized intramuscularly with RNA vaccines, then 21 d after immunization, mice were injected intravenously with 5×10⁶ CT26.CL25 cells. Then 12 d later, pulmonary metastases are counted by experimenters ‘blinded’ to sample identity. For experiments with established CT26.CL25 tumor, BALBIc mice are injected intravenously with 1×10⁵ CT26.CL25 cells, and tumor is allowed to establish itself for 2 d. Mice are then therapeutically immunized with 100 ug RNA, then assessed for survival. Alternatively, 0.1 ug IL-12 (Genetics Institute, Cambridge, Mass.) is administered intravenously once daily for 3 d starting 12 h after the therapeutic immunization and survival is assessed. Results are given in Example 21 (Table VI).

### EXAMPLE 61

[2093] Isolation of Lipid Rafts

[2094] Lipid rafts were isolated using modified lysis conditions and flotation on discontinuous sucrose gradients (20, 36, 37). In brief, cells (10⁸) were washed with ice-cold PBS and lysed for 30 mm on ice in 1% Triton X-100 in TNEV containing protease and phosphatase inhibitors (TNEV: 10 mM Tris/HCl, pH 7.5, 150 mM NaCl, and 5 mM EDTA; CLAP [2.5 mg/ml each of chymostatin, leupeptin, antipain, and pepstatin A in DMSO] and 1 mM sodium orthovanadate). The lysis solution was further homogenized with ten strokes in a Wheaton loose-fitting dounce homogenizer. Nuclei and cellular debris were pelleted by centrifugation at 900 g for 10 min. For the discontinuous sucrose gradient, 1 ml of cleared supematant was mixed with 1 ml of 85% sucrose in TNEV and transferred to the bottom of a Beckman 14×89 mm centrifuge tube. The diluted lysate was overlaid with 6 ml 35% sucrose in TNEV and finally 3.5 ml 5% sucrose in TNEV. The samples were centrifuged in an SW41 rotor at 200,000 g for 16-20 h at 4° C. 1-ml fractions were collected from the top of the gradient.

### Additional Documents Incorporated by Reference

[2095] This application incorporates by reference the following patents and currently pending patent applications that disclose inventions of the present inventor alone or with co-inventors.

[2096] 1. Patent application WO91/US342, “Tumor Killing Effects of Enterotoxins and Related Compounds” filed Jan. 17, 1991, and published as WO 91/10680 on Jul. 25, 1991.

[2097] 2. U.S. Ser. No. 07/891,718 “Tumor Killing Effects of Enterotoxins and Related Compounds,” filed Jun. 1, 1992.

[2098] 3. U.S. Pat. No. 5,728,388, “Method of Cancer Treatment,” issued Mar. 17, 1998.

[2099] 4. U.S. Ser. No. 08/491,746, “Method of Cancer Treatment,” filed Jun. 19, 1995.

[2100] 5. U.S. Ser. No. 08/898,903 “Method of Cancer Treatment,” filed Jul. 23, 1997.

[2101] 6. U.S. Ser. No. 08/896,933 “Tumor Killing Effects of Enterotoxins and Related Compounds,” filed Jul. 18, 1997.

[2102] 7. U.S. Ser. No. 60/085,506, “Compositions and Methods for Treatment of Cancer,” filed May 5, 1998.

[2103] 8. U.S. Ser. No. 60/094,952 “Compositions and Methods for Treatment of Cancer” filed Jul. 31, 1998.

[2104] 9. U.S. Ser. No. 60/033,172 “Superantigen-Based Methods and Compositions for Treatment of Cancer,” filed Dec. 17, 1996.

[2105] 10. U.S. Ser. No. 60/044,074 “Superantigen-Based Methods and Compositions for Treatment of Cancer,” filed Apr. 17, 1997.

[2106] 11. U.S. Ser. No. 09/061,334 “Tumor Cells with Increased Immunogenicity and Uses Thereof,” filed Apr. 17, 1998.

[2107] 9. U.S. Ser. No. 09/311,581 “Compositions and Methods for Treating Neoplastic Disease,” filed May 14, 1999.

[2108] 10. U.S. Ser. No. 60/173,371 “Compositions and Methods for Treating Neoplastic Disease,” filed Dec. 28, 1999.

[2109] 11. U.S. Ser. No. 05/208,128 “Compositions and Methods for Treating Neoplastic Disease,” filed May 31, 2000.

[2110] 12. U.S. Ser. No. 09/650,884 “Compositions and Methods for Treating Neoplastic Disease,” filed Dec. 28, 2000.

[2111] Moreover, all references cited herein are incorporated by reference, whether specifically incorporated or not.

[2112] Having now fully described this invention, it will be appreciated by those skilled in the art that the same can be performed within a wide range of equivalent parameters, concentrations, and conditions without departing from the spirit and scope of the invention and without undue experimentation.

[2113] While this invention has been described in connection with specific embodiments thereof, it will be understood that it is capable of further modifications. This application is intended to cover any variations, uses, or adaptations of the invention following, in general, the principles of the invention and including such departures from the present disclosure as come within known or customary practice within the art to which the invention pertains and as may be applied to the essential features hereinbefore set forth as follows in the scope of the appended claims.

The application's sequence listing, which the Patent Office published only in electronic form, follows.

SEQUENCE LISTING (166 sequences)

SEQ ID NO: 1 - DNA, 801 bp, Staphylococcus sp.
atgtataagagattatttatttcacatgtaattttgatattcgcactgatattagttatttctacacccaacgttttagcagagagtcaaccagatcctaaaccagatgagttgcacaaatcgagtaaattcactggtttgatggaaaatatgaaagttttgtatgatgataatcatgtatcagcaataaacgttaaatctatagatcaatttctatactttgacttaatatattctattaaggacactaagttagggaattatgataatgttcgagtcgaatttaaaaacaaagatttagctgataaatacaaagataaatacgtagatgtgtttggagctaattattattatcaatgttatttttctaaaaaaacgaatgatattaattcgcatcaaactgacaaacgaaaaacttgtatgtatggtggtgtaactgagcataatggaaaccaattagataaatatagaagtattactgttcgggtatttgaagatggtaaaaatttattatcttttgacgtacaaactaataagaaaaaggtgactgctcaagaattagattacctaactcgtcactatttggtgaaaaataaaaaactctatgaatttaacaactcgccttatgaaacgggatatattaaatttatagaaaatgagaatagcttttggtatgacatgatgcctgcaccaggagataaatttgaccaatctaaatatttaatgatgtacaatgacaataaaatggttgattctaaagatgtgaagattgaagtttatcttacgacaaagaaaaagtga

SEQ ID NO: 2 - DNA, 886 bp, Artificial Sequence
  Synthetic Sequence
cggctcacagcgcgcccggctattctcgcaggatcagtcgacatgtataagagattatttatttcacatgtaattttgatattcgcactgatattagttatttctacacccaacgttttagcagagagtcaaccagatcctaaaccagatgagttgcacaaatcgagtaaattcactggtttgatggaaaatatgaaagttttgtatgatgataatcatgtatcagcaataaacgttaaatctatagatcaatttctatactttgacttaatatattctattaaggacactaagttagggaattatgataatgttcgagtcgaatttaaaaacaaagatttagctgataaatacaaagataaatacgtagatgtgtttggagctaattattattatcaatgttatttttctaaaaaaacgaatgatattaattcgcatcaaactgacaaacgaaaaacttgtatgtatggtggtgtaactgagcataatggaaaccaattagataaatatagaagtattactgttcgggtatttgaagatggtaaaaatttattatcttttgacgtacaaactaataagaaaaaggtgactgctcaagaattagattacctaactcgtcactatttggtgaaaaataaaaaactctatgaatttaacaactcgccttatgaaacgggatatattaaatttatagaaaatgagaatagcttttggtatgacatgatgcctgcaccaggagataaatttgaccaatctaaatatttaatgatgtacaatgacaataaaatggttgattctaaagatgtgaagattgaagtttatcttacgacaaagaaaaagtgaggatccagacatgataagataccttgatgagtttggacaaacc

SEQ ID NO: 3 - DNA, 24 bp, Unknown
  Primer
ggcgtcgacatgtataagagatta

SEQ ID NO: 4 - DNA, 24 bp, Unknown
  Primer
gccggatcctcactttttctttgt

SEQ ID NO: 5 - DNA, 22 bp, Unknown
  Primer
tatgaaagttttgtatgatgat

SEQ ID NO: 6 - DNA, 20 bp, Unknown
  Primer
agtgacgagttaggtaatct

SEQ ID NO: 7 - DNA, 1443 bp, Staphylococcus aureus
  CDS (262)..(1032)
ccaaaataatggcaagtactccgttgtcaataccaagtaagtaagatatctgaaatgtataatagagtaaaaatgaaatctttttattatattatagacaagtataaaaaaggtatagtaatatatgtatgtataagtaaataatgataattctataattattgtatataactaataattacttcgacaaaaataatctattatccaaatattttagataataaaaagtttgtatggaattatgctttagaggtgagcaaaatgaaaaaaacagcatttatactacttttattcattgccctaacgtggacaacaagtccacttgtaaatggtagcgagaaaagcgaagaaataaatgaaaaagatttgcgaaaaaagtctgaattgcagggagcagctttaggcaatcttaaacaaatctattattacaatgaaaaagctaaaactgaaaataaagagagtcacgatcaatttttacagcatactatattgtttaaaggcttttttacaaatcattcatggtataacgatttattagtagattttgattcaaaggatattgttgataaatataaagggaaaaaagtagacttatatggtgcttattatggttatcaatgtgcgggtggtacaccaaacaaaacagcttgcatgtatggtggtgtaacgttacatgataataatcgattgaccgaagagaaaaaagtgccgatcaatttatggctagacggtaaacaaaatacagtacctttggaaacggttaaaacgaataagaaaaatgtaactgttcaggagttggatcttcaagcaagacgttatttacaggaaaaatataatttatataactctgatgtttttgatgggaaggttcagaggggattaatcgtgtttcatacttctacagaaccttcggttaattacgatttatttggtgctcaaggacagaattcaaatacactattaagaatatatagagataataaaacgattaactctgaaaacatgcatattgatatatatttatatacaagttaaacatggtagttttgaacacgtaatgttcagattattatgaaccgagaataatctgaaagtttacaagcagtaaaaaaagtatatgtgctataatatgctttgagcaagttggatagatggtggctatctgagtataaggaggtggtgcctatggtggcattactgaaatctttagaaaggagacgcctaatgattacaattagtaccaatgttgcagtttggtttattccttattgcattgataggtctagtaatcaagcttattgaattaagcaataaaaaataaccatcgctaactttggctggtttcgatggttaaatggttattaatttaatctttaatctaaaatagccaccgtctttttaacgggctcattagggtaacatgtttgcgcatgttgccctttt

SEQ ID NO: 8 - protein, 257 aa, Staphylococcus aureus
MKKTAFILLLFIALTWTTSPLVNGSEKSEEINEKDLRKKSELQGAALGNLKQIYYYNEKAKTENKESHDQFLQHTILFKGFFTNHSWYNDLLVDFDSKDIVDKYKGKKVDLYGAYYGYQCAGGTPNKTACMYGGVTLHDNNRLTEEKKVPINLWLDGKQNTVPLETVKTNKKNVTVQELDLQARRYLQEKYNLYNSDVFDGKVQRGLIVFHTSTEPSVNYDLFGAQGQNSNTLLRIYRDNKTINSENMHIDIYLYTS

SEQ ID NO: 9 - DNA, 1712 bp, Staphylococcus aureus
  CDS (244)..(1044)
gaactaggtagaaaaataattatgagaaaacactatgttgttaaagatgttttcgtatataagtttaggtgatgtatagttacttaattttaaaagcataacttaattaatataaataacatgagattattaaatataattaagtttcttttaatgtttttttaattgaatatttaagattataacatatatttaaagtgtatctagatactttttgggaatgttggataaaggagataaaaaatgtataagagattatttatttcacatgtaattttgatattcgcactgatattagttatttctacacccaacgttttagcagagagtcaaccagatcctaaaccagatgagttgcacaaatcgagtaaattcactggtttgatggaaaatatgaaagttttgtatgatgataatcatgtatcagcaataaacgttaaatctatagatcaatttctatactttgacttaatatattctattaaggacactaagttagggaattatgataatgttcgagtcgaatttaaaaacaaagatttagctgataaatacaaagataaatacgtagatgtgtttggagctaattattattatcaatgttatttttctaaaaaaacgaatgatattaattcgcatcaaactgacaaacgaaaaacttgtatgtatggtggtgtaactgagcataatggaaaccaattagataaatatagaagtattactgttcgggtatttgaagatggtaaaaatttattatcttttgacgtacaaactaataagaaaaaggtgactgctcaagaattagattacctaactcgtcactatttggtgaaaaataaaaaactctatgaatttaacaactcgccttatgaaacgggatatattaaatttatagaaaatgagaatagcttttggtatgacatgatgcctgcaccaggagataaatttgaccaatctaaatatttaatgatgtacaatgacaataaaatggttgattctaaagatgtgaagattgaagtttatcttacgacaaagaaaaagtgaaattatattttagaaaagtaaatatgaagagttagtaattaaggcaggcacttatagagtacctgccttttctaatattatttagttatagttatttttgttatatctctctgatttagcattaaccccttgttgccattatagttttcaccaactttagctgaaattgggggatcatttttatctttactatggatagttactgtgtcgccgtttttaacgatttgtttctcttttaatttgtcagttaattttttccatgcatcatttgcgtcaaacctatttccatttggatttattcttgacaaatcaattcttttaacactatcggtattaatcggcttgttattaaaattactaagttcatctaaatcagctgtacccgtaatactactttcgccaccattatttaaattgtacgtaacaccaactgtctcatttgctgttttatcgataatatttgcttctttcaaagcatctcttacatttttccataagtctctatctgttatttcagaagcctttgcaacgttattaataccattataatttgaagaagaatgaaaacctgaacctactgttgttaaaactaaagcacttgctatcaatgttcttgttaatagttttttattcattttattttctcctataacttatttgcaatcgat

SEQ ID NO: 10 - protein, 266 aa, Staphylococcus aureus
MYKRLFISHVILIFALILVISTPNVLAESQPDPKPDELHKSSKFTGLMENMKVLYDDNHVSAINVKSIDQFLYFDLIYSIKDTKLGNYDNVRVEFKNKDLADKYKDKYVDVFGANYYYQCYFSKKTNDINSHQTDKRKTCMYGGVTEHNGNQLDKYRSITVRVFEDGKNLLSFDVQTNKKKVTAQELDYLTRHYLVKNKKLYEFNNSPYETGYIKFIENENSFWYDMMPAPGDKFDQSKYLMMYNDNKMVDSKDVKIEVYLTTKKK

SEQ ID NO: 11 - DNA, 1095 bp, Staphylococcus aureus
  CDS (118)..(918)
atcattaaatataattaattttcttttaatatttttttaattgaatatttaagattataagatatatttaaagtgtatctagatactttttgggaatgttggatgaaggagataaaaatgaataagagtcgatttatttcatgcgtaattttgatattcgcacttatactagttctttttacacccaacgtattagcagagagccaaccagaccctacgccagatgagttgcacaaagcgagtaaattcactggtttgatggaaaatatgaaagttttatatgatgatcattatgtatcagcaactaaagttaagtctgtagataaatttttggcacatgatttaatttataacattagtgataaaaaactgaaaaattatgacaaagtgaaaacagagttattaaatgaaggtttagcaaagaagtacaaagatgaagtagttgatgtgtatggatcaaattactatgtaaactgctatttttcatccaaagataatgtaggtaaagttacaggtggcaaaacttgtatgtatggaggaataacaaaacatgaaggaaaccactttgataatgggaacttacaaaatgtacttataagagtttatgaaaataaaagaaacacaatttcttttgaagtgcaaactgataagaaaagtgtaacagctcaagaactagacataaaagctaggaattttttaattaataaaaaaaatttgtatgagtttaacagttcaccatatgaaacaggatatataaaatttattgaaaataacggcaatactttttggtatgatatgatgcctgcaccaggcgataagtttgaccaatctaaatatttaatgatgtacaacgacaataaaacggttgattctaaaagtgtgaagatagaagtccaccttacaacaaagaatggataatgttaatccgattttgatataaaaagtgaaagtattagatatatttgaaaggtaagtacttcggtgcttgcctttttaggatgcatatatatagattaaaccgcacttctatattaatagaaagtgcggttatttatacactcaatctaaactataataattggaatcatcttcaaa

SEQ ID NO: 12 - protein, 266 aa, Staphylococcus aureus
MNKSRFISCVILIFALILVLFTPNVLAESQPDPTPDELHKASKFTGLMENMKVLYDDHYVSATKVKSVDKFLAHDLIYNISDKKLKNYDKVKTELLNEGLAKKYKDEVVDVYGSNYYVNCYFSSKDNVGKVTGGKTCMYGGITKHEGNHFDNGNLQNVLIRVYENKRNTISFEVQTDKKSVTAQELDIKARNFLINKKNLYEFNSSPYETGYIKFIENNGNTFWYDMMPAPGDKFDQSKYLMMYNDNKTVDSKSVKIEVHLTTKNG

SEQ ID NO: 13 - DNA, 1136 bp, Staphylococcus aureus
  CDS (292)..(1068)
gatcaaatatattgatataatgaaagtgagcaagttggatagattgcggctagtctcttgaaaaaagggattcctatgtttatagttggtacttctaggaaggactagcatgtcttatttcgaaatgctgatggttgtattaacaattatgagtttagtcttaattagtaatcaaaactctgaatgtattgtctacataatcggtgtaacaataatatatatccgaaagattaaagtactctataaaagaatcatttaaaggtgctcaaatttattgaaaaaaggtggaatatgaaaaaatttaacattcttattgcattactcttttttactagtttggtaatatctcctttaaacgttaaagccaatgaaaacattgattcagtaaaagagaaagaattgcataaaaaatctgaattaagtagtaccgcgctaaataatatgaaacattcttatgcagataaaaatccaataataggagaaaataaaagtacaggagatcaatttttagaaaatactttgctttacaaaaaattttttactgaccttatcaattttgaagatttattaataaacttcaattcaaaagaaatggctcaacatttcaaatctaaaaatgtagatgtttaccctataagatatagcattaattgttatggtggtgaaatagataggactgcttgtacatatggaggtgtcactccacacgaaggtaataaattaaaagaacgaaaaaaaataccaatcaatttgtggataaatggtgtacaaaaagaagtttctttagataaagttcaaacagataaaaaaaatgttaccgtacaagaattagatgcacaagcaaggcgctatttgcaaaaggatttaaaattgtataataatgatactctcggaggaaaaatacagcgcggaaaaatagagtttgattcttctgatgggtctaaagtctcttatgatttatttgatgttaagggtgattttcccgaaaaacaattacgaatatacagtgataataaaacattatccacagagcaccttcatattgacatctatttatatgaaaagtagtcaattcaaatactttaacatcagacactaaagccatttcaaagaatgctaaagatttattaatcggt

SEQ ID NO: 14 - protein, 258 aa, Staphylococcus aureus
MKKFNILIALLFFTSLVISPLNVKANENIDSVKEKELHKKSELSSTALNNMKHSYADKNPIIGENKSTGDQFLENTLLYKKFFTDLINFEDLLINFNSKEMAQHFKSKNVDVYPIRYSINCYGGEIDRTACTYGGVTPHEGNKLKERKKIPINLWINGVQKEVSLDKVQTDKKNVTVQELDAQARRYLQKDLKLYNNDTLGGKIQRGKIEFDSSDGSKVSYDLFDVKGDFPEKQLRIYSDNKTLSTEHLHIDIYLYEK

SEQ ID NO: 15 - DNA, 774 bp, Staphylococcus aureus
  CDS (1)..(744)
atgaaaaaaacagcatttatactacttttattcattgccctaacgttgacaacaagtccacttgtaaatggtagcgagaaaagcgaagaaataaatgaaaaagatttgcgaaaaaagtctgaattacaaagaaatgctttaagcaatcttaggcaaatttattattataatgaaaaagctataactgaaaacaaagagagtgatgatcagtttttagagaatactttgttatttaaaggttttttcacaggtcatccatggtataacgatttattagtagatcttggttcaaaagatgctactaataaatataaagggaaaaaagtagacttatatggtgcttattatggatatcaatgtgctggaggcacaccaaataaaacagcatgtatgtacgggggtgtaacattacatgataataaccgattgaccgaagaaaaaaaagtaccaattaacttgtggatagacggaaaacaaactacagtacctatagataaagttaaaacaagcaaaaaagaagtaactgttcaagagctagatcttcaggcaaggcattatttacacggaaaatttggtttatataactcagacagctttggcggtaaggtgcaaagaggcttgattgtgtttcattcttctgaagggtccacggtaagttatgatttgtttgatgctcaagggcaatatccagatacattattaagaatttacagagataataaaactattaattcagagaacctccatattgatttgtatttatacacaacttga

SEQ ID NO: 16 - protein, 248 aa, Staphylococcus aureus
MKKTAFILLLFIALTLTTSPLVNGSEKSEEINEKDLRKKSELQRNALSNLRQIYYYNEKAITENKESDDQFLENTLLFKGFFTGHPWYNDLLVDLGSKDATNKYKGKKVDLYGAYYGYQCAGGTPNKTACMYGGVTLHDNNRLTEEKKVPINLWIDGKQTTVPIDKVKTSKKEVTVQELDLQARHYLHGKFGLYNSDSFGGKVQRGLIVFHSSEGSTVSYDLFDAQGQYPDTLLRIYRDNKTINSENL

SEQ ID NO: 17 - DNA, 731 bp, Staphylococcus aureus
  CDS (16)..(720)
taaggagaattaaaaatgaataaaaaattactaatgaatttttttatcgtaagccctttgttgcttgcgacaactgctacagattttacccctgttcccttatcatctaatcaaataatcaaaactgcaaaagcatctacaaacgataatataaaggatttgctagactggtatagtagtgggtctgacacttttacaaatagtgaagttttagataattccttaggatctatgcgtataaaaaacacagatggcagcatcagcttgataatttttccgagtccttattatagccctgcttttacaaaaggggaaaaagttgacttaaacacaaaaagaactaaaaaaagccaacatactagcgaaggaacttatatccatttccaaataagtggcgttacaaatactgaaaaattacctactccaatagaactacctttaaaagttaaggttcatggtaaagatagccccttaaagtatgggccaaagttcgataaaaaacaattagctatatcaactttagactttgaaattcgtcatcagctaactcaaatacatggattatatcgttcaagcgataaaacgggtggttattggaaaataacaatgaatgacggatccacatatcaaagtgatttatctaaaaagtttgaatacaatactgaaaaaccacctataaatattgatgaaataaaaactatagaagcagaaattaattaatttaccacttt

SEQ ID NO: 18 - protein, 234 aa, Staphylococcus aureus
MNKKLLMNFFIVSPLLLATTATDFTPVPLSSNQIIKTAKASTNDNIKDLLDWYSSGSDTFTNSEVLDNSLGSMRIKNTDGSISLIIFPSPYYSPAFTKGEKVDLNTKRTKKSQHTSEGTYIHFQISGVTNTEKLPTPIELPLKVKVHGKDSPLKYGPKFDKKQLAISTLDFEIRHQLTQIHGLYRSSDKTGGYWKITMNDGSTYQSDLSKKFEYNTEKPPINIDEIKTIEAEIN

SEQ ID NO: 19 - DNA, 1031 bp, Streptococcus pyogenes
  CDS (79)..(831)
attgttaataataatggttaattgtaataacctttttaaatctaaaggagaacccagatataaaatggaggaatattaatggaaaacaataaagaagtattgaagaaaatggtattttttgttttaatgaaatttcttggactaacaatcttgccaaaaggtatttgttcaacaagacccaagcccagccaattacaaagatctaatttagttaaaaccttcaaaatatatattttctttatgagggtgaccctggttactcacgagaatgtgaaatctgttgatcaacttttatcacacgatttaatatataatgtttcagggccaaattatgataaattaaaaactgaacttaagaaccaagagatggcaactttatttaaggataaaaacgttgatatttatggtgtagaatattaccatctctgttatttatgtgaaaatgcagaaaggagtgcatgtctctacggaggggtaacaaatcatgaagggaatcatttagaaattcctaaaaagatagtcgttaaagtatcaatcgatggtatccaaagcctatcatttgatattgaacaaataaaaaatggtaactgctcaagaattagctatacagttagaaaatatcttacagataataagcaactatatactaatggaccttctaaatatgaaactggatatataaagttcatacctaagaataaagaaagtttttggtttgattttttccctgaaccagaatttactcaatctaaatatcttatgatatataaagataatgaaacgcttgactcaaacacaagccaaattgaagtctacctaacaaccaagtaacttttgcttttggcaaccttacctactgctggatttagaaattttattgcaattcttttattaatgtaaaaacgctcatttgatgagcggttttgtcttatctaaaggagctttacctcctaatgctgcaaaattttaaatgttggatttttgtatttgtcattgtatttgatgggtaatcccatttttcgacagacatc

SEQ ID NO: 20 - protein, 250 aa, Streptococcus pyogenes
MENNKEVLKKMVFFVLMKFLGLTILPKGICSTRPKPSQLQRSNLVKTFKIYIFFMRVTLVTHENVKSVDQLLSHDLIYNVSGPNYDKLKTELKNQEMATLFKDKNVDIYGVEYYHLCYLCENAERSACLYGGVTNHEGNHLEIPKKIVVKVSIDGIQSLSFDIEQIKNGNCSRISYTVRKYLTDNKQLYTNGPSKYETGYIKFIPKNKESFWFDFFPEPEFTQSKYLMIYKDNETLDSNTSQIEVYLTTK

SEQ ID NO: 21 - DNA, 25 bp, Unknown
  Primer
gggaattccatggagagtcaaccag

SEQ ID NO: 22 - DNA, 21 bp, Unknown
  Primer
gcaagcttaacttgttaatag

SEQ ID NO: 23 - DNA, 22 bp, Unknown
  Primer
gggaattccatggagaaaagcg

SEQ ID NO: 24 - DNA, 22 bp, Unknown
  Primer
gcggatcctcactttttctttg

SEQ ID NO: 25 - DNA, 50 bp, Unknown
  Primer
ggggtaccccgaaggaggaaaaaaaaatgtctacaaacgataatataaag

SEQ ID NO: 26 - DNA, 42 bp, Unknown
  Primer
tgctctagagcattaattaatttctgcttctatagtttttat

SEQ ID NO: 27 - DNA, 1612 bp, Escherichia coli
  CDS (200)..(1159)
agtcctcgatggcggtccattatctgcattatgcgttgttagctcagccggacagagcaattgccttctgagcaatcggtcactggttcgaatccagtacaacgcgccatatttatttaccaggctcgcttttgcgggccttttttatatctgcgccgggtctggtgctgattacttcagccaaaaggaacacctgtatatgaagtgtatattatttaaatgggtactgtgcctgttactgggtttttcttcggtatcctattcccgggagtttacgatagacttttcgacccaacaaagttatgtctcttcgttaaatagtatacggacagagatatcgacccctcttgaacatatatctcaggggaccacatcggtgtctgttattaaccacaccccaccgggcagttattttgctgtggatatacgagggcttgatgtctatcaggcgcgttttgaccatcttcgtctgattattgagcaaaataatttatatgtggccgggttcgttaatacggcaacaaatactttctaccgtttttcagattttacacatatatcagtgcccggtgtgacaacggtttccatgacaacggacagcagttataccactctgcaacgtgtcgcagcgctggaacgttccggaatgcaaatcagtcgtcactcactggtttcatcatatctggcgttaatggagttcagtggtaatacaatgaccagagatgcatccagagcagttctgcgttttgtcactgtcacagcagaagccttacgcttcaggcagatacagagagaatttcgtcaggcactgtctgaaactgctcctgtgtatacgatgacgccgggagacgtggacctcactctgaactgggggcgaatcagcaatgtgcttccggagtatcggggagaggatggtgtcagagtggggagaatatcctttaataatatatcagcgatactggggactgtggccgttatactgaattgccatcatcagggggcgcgttctgttcgcgccgtgaatgaagagagtcaaccagaatgtcagataactggcgacaggcctgttataaaaataaacaatacattatgggaaagtaatacagctgcagcgtttctgaacagaaagtcacagtttttatatacaacgggtaaataaaggagttaagcatgaagaagatgtttatggcggttttatttgcattagcttctgttaatgcaatggcggcggattgtgctaaaggtaaaattgagttttccaagtataatgaggatgacacatttacagtgaaggttgacgggaaagaatactggaccagtcgctggaatctgcaaccgttactgcaaagtgctcagttgacaggaatgactgtcacaatcaaatccagtacctgtgaatcaggctccggatttgctgaagtgcagtttaataatgactgaggcataacctgattcgtggtatgtgggtaacaagtgtaatctgtgtcacaattcagtcagttgacagttgcctgtcagactgagcatttgttaaaaaaatttcgcatggtgaatccccctgtgtggaggggcgactggtgaaaaatccttgcttgtgattcattatcgacac

SEQ ID NO: 28 - protein, 319 aa, Escherichia coli
MKCILFKWVLCLLLGFSSVSYSREFTIDFSTQQSYVSSLNSIRTEISTPLEHISQGTTSVSVINHTPPGSYFAVDIRGLDVYQARFDHLRLIIEQNNLYVAGFVNTATNTFYRFSDFTHISVPGVTTVSMTTDSSYTTLQRVAALERSGMQISRHSLVSSYLALMEFSGNTMTRDASRAVLRFVTVTAEALRFRQIQREFRQALSETAPVYTMTPGDVDLTLNWGRISNVLPEYRGEDGVRVGRISFNNISAILGTVAVILNCHHQGARSVRAVNEESQPECQITGDRPVIKINNTLWESNTAAAFLNRKSQFLYTTGK

SEQ ID NO: 29 - protein, 4 aa, Mus musculus
YQTI

SEQ ID NO: 30 - DNA, 31 bp, Unknown
  Primer
gaattcaagcttatgatcactatgcttcaag

SEQ ID NO: 31 - DNA, 29 bp, Unknown
  Primer
gaattcctgcagtcagacattattctaac

SEQ ID NO: 32 - DNA, 3938 bp, Yersinia pseudotuberculosis
  CDS (474)..(3434)
tcatcaaggcaaccatcaggattaatgcggatattgcggagtaacacttcagactgaaagtagaaataaaaaccgcagcagacaactgacaacatcaaatgaagggggcttattctaattgatattatttatatgataatagttcattttgtatttttgttttttttgatattctcacctgcttagttacaataaatcaattctatcgctgtatggtatagactgttttattatatattttgaatatttttaatctgcccagtctggttttttaaaaaagtgctatcctcttaatgtctttactaaattagaaaacaagtttcactttcaactattgcatctttaattaatggtcaaggtgatttcaaatgctcgtttgtggccagttatacctcaaataactcaagttgttgagcacagccaacgcacatgcagtttgacgtatgacaggtatgctttatttcatttaaattatgatggttttccagccaatcagtgagtttctcttgataaggaatgcgggaatgtctatgtattttaataaaataatttcatttaatattatttcacgaatagttatttgtatctttttgatatgtggaatgttcatggctggggcttcagaaaaatatgatgctaacgcaccgcaacaggtccagccttattctgtctcttcatctgcatttgaaaatctccatcctaataatgaaatggagagttcaatcaatcccttttccgcatcggatacagaaagaaatgctgcaataatagatcgcgccaataaggagcaggagactgaagcggtgaataagatgataagcaccggggccaggttagctgcatcaggcagggcatctgatgttgctcactcaatggtgggcgatgcggttaatcaagaaatcaaacagtggttaaatcgattcggtacggctcaagttaatctgaattttgacaaaaatttttcgctaaaagaaagctctcttgattggctggctccttggtatgactctgcttcattcctcttttttagtcagttaggtattcgcaataaagacagccgcaacacacttaaccttggcgtcgggatacgtacattggagaacggttggctgtacggacttaatactttttatgataatgatttgaccggccacaaccaccgtatcggtcttggtgccgaggcctggaccgattatttacagttggctgccaatgggtattttcgcctcaatggatggcactcgtcgcgtgatttctccgactataaagagcgcccagccactgggggggatttgcgcgcgaatgcttatttacctgcactcccacaactgggggggaagttgatgtatgagcaatacaccggtgagcgtgttgctttatttggtaaagataatctgcaacgcaacccttatgccgtgactgccgggatcaattacacccccgtgcctctactcactgtcggggtagatcagcgtatggggaaaagcagtaagcatgaaacacagtggaacctccaaatgaactatcgcctgggcgagagttttcagtcgcaacttagcccttcagcggtggcaggaacacgtctactggcggagagccgctataaccttgtcgatcgtaacaataatatcgtgttggagtatcagaaacagcaggtggttaaactgacattatcgccagcaactatctccggcctgccgggtcaggtttatcaggtgaacgcacaagtacaaggggcatctgctgtaagggaaattgtctggagtgatgccgaactgattgccgctggcggcacattaacaccactgagtaccacacaattcaacttggttttaccgccttataaacgcacagcacaagtgagtcgggtaacggacgacctgacagccaacttttattcgcttagtgcgctcgcggttgatcaccaaggaaaccgatctaactcattcacattgagcgtcaccgttcagcagcctcagttgacattaacggcggccgtcattggtgatggcgcaccggctaatgggaaaactgcaatcaccgttgagttcaccgttgctgattttgaggggaaacccttagccgggcaggaggtggtgataaccaccaataatggtgcgctaccgaataaaatcacggaaaagacagatgcaaatggcgtcgcgcgcattgcattaaccaatacgacagatggcgtgacggtagtcacagcagaagtggaggggcaacggcaaagtgttgatacccactttgttaagggtactatcgcggcggataaatccactctggctgcggtaccgacatctatcatcgctgatggtctaatggcttcaaccatcacgttggagttgaaggatacctatggggacccgcaggctggcgcgaatgtggcttttgacacaaccttaggcaatatgggcgttatcacggatcacaatgacggcacttatagcgcaccattgaccagtaccacgttgggggtagcaacagtaacggtgaaagtggatggggctgcgttcagtgtgccgagtgtgacggttaatttcacggcagatcctattccagatgctggccgctccagtttcaccgtctccacaccggatatcttggctgatggcacgatgagttccacattatcctttgtccctgtcgataagaatggccattttatcagtgggatgcagggcttgagttttactcaaaacggtgtgccggtgagtattagccccattaccgagcagccagatagctataccgcgacggtggttgggaatagtgtcggtgatgtcacaatcacgccgcaggttgataccctgatactgagtacattgcagaaaaaaatatccctattcccggtacctacgctgaccggtattctggttaacgggcaaaatttcgctacggataaagggttcccgaaaacgatctttaaaaacgccacattccagttacagatggataacgatgttgctaataatactcagtatgagtggtcgtcgtcattcacacccaatgtatcggttaacgatcagggtcaggtgacgattacctaccaaacctatagcgaagtggctgtgacggcgaaaagtaaaaaattcccaagttattcggtgagttatcggttctacccaaatcggtggatatacgatggcggcagatcgctggtatccagtctcgaggccagcagacaatgccaaggttcagatatgtctgcggttcttgaatcctcacgtgcaaccaacggaacgcgtgcgcctgacgggacattgtggggcgagtgggggagcttgaccgcgtatagttctgattggcaatctggtgaatattgggtcaaaaagaccagcacggattttgaaaccatgaatatggacacaggcgcactgcaaccagggcctgcatacttggcgttcccgctctgtgcgctgtcaatataaccagataacagatagcaataagaacagtttaatgagctgattatttggggcgcgaatgggagtccggcaatcctagactcgccccataagtagcaaacgtccagaagaacaacgccgctcaggttaattgagcggcgctgtttttttaaaaggattgtcgcgattaaatgccgatcttacggcccaggatattggcacctttagcctgaccatcagggccatagagcgattggccgtggcgggtattcaggactgccaatgcttgattattatgttcaatatgttgttgtaacagtaacccattgtgcaggttgctgtaacgcaggcgctcagtgagttgcaaaagacgctgccaacgttcagctaaagcctgcatgtggggataaggcgcttgaatattcgcggtggtctcggtggttatccgggtctgatccaaataggccaaggttgccaatattgaacttttttgttccgttaccccttgcaatacccagccttggatcc

SEQ ID NO: 33 - protein, 986 aa, Yersinia pseudotuberculosis
MMVFQPISEFLLIRNAGMSMYFNKIISFNIISRIVICIFLICGMFMAGASEKYDANAPQQVQPYSVSSSAFENLHPNNEMESSINPFSASDTERNAAIIDRANKEQETEAVNKMISTGARLAASGRASDVAHSMVGDAVNQEIKQWLNRFGTAQVNLNFDKNFSLKESSLDWLAPWYDSASFLFFSQLGIRNKDSRNTLNLGVGIRTLENGWLYGLNTFYDNDLTGHNHRIGLGAEAWTDYLQLAANGYFRLNGWHSSRDFSDYKERPATGGDLRANAYLPALPQLGGKLMYEQYTGERVALFGKDNLQRNPYAVTAGINYTPVPLLTVGVDQRMGKSSKHETQWNLQMNYRLGESFQSQLSPSAVAGTRLLAESRYNLVDRNNNIVLEYQKQQVVKLTLSPATISGLPGQVYQVNAQVQGASAVREIVWSDAELIAAGGTLTPLSTTQFNLVLPPYKRTAQVSRVTDDLTANFYSLSALAVDHQGNRSNSFTLSVTVQQPQLTLTAAVIGDGAPANGKTAITVEFTVADFEGKPLAGQEVVITTNNGALPNKITEKTDANGVARIALTNTTDGVTVVTAEVEGQRQSVDTHFVKGTIAADKSTLAAVPTSIIADGLMASTITLELKDTYGDPQAGANVAFDTTLGNMGVITDHNDGTYSAPLTSTTLGVATVTVKVDGAAFSVPSVTVNFTADPIPDAGRSSFTVSTPDILADGTMSSTLSFVPVDKNGHFISGMQGLSFTQNGVPVSISPITEQPDSYTATVVGNSVGDVTITPQVDTLILSTLQKKISLFPVPTLTGILVNGQNFATDKGFPKTIFKNATFQLQMDNDVANNTQYEWSSSFTPNVSVNDQGQVTITYQTYSEVAVTAKSKKFPSYSVSYRFYPNRWIYDGGRSLVSSLEASRQCQGSDMSAVLESSRATNGTRAPDGTLWGEWGSLTAYSSDWQSGEYWVKKTSTDFETMNMDTGALQPGPAYLAFPLCALSI

SEQ ID NO: 34 - protein, 9 aa, Artificial Sequence
  Synthetic Sequence
  MISC_FEATURE (2)..(2): Xaa is a variable amino acid
  MISC_FEATURE (5)..(5): Xaa is a variable amino acid
  MISC_FEATURE (9)..(9): Xaa is a variable amino acid
LXGGXGNDX

SEQ ID NO: 35 - DNA, 830 bp, Neisseria meningitidis
  CDS (143)..(667)
tcggcaaagcagccggataccgctacgtatcttgaagtattgaaaatattacgatgcaaaaaagaaaatttaagtataatacagcaggattctttaacggattcttaacaatttttctaactgaccataaaggaaccaaaatatgaaaaaagcacttgccacactgattgccctcgctctcccggccgccgcactggcggaaggcgcatccggcttttacgtccaagccgatgccgcacacgcaaaagcctcaagctctttaggttctgccaaaggcttcagcccgcgcatctccgcaggctaccgcatcaacgacctccgcttcgccgtcgattacacgcgctacaaaaactataaagccccatccaccgatttcaaactttacagcatcggcgcgtccgccatttacgacttcgacacccaatcgcccgtcaaaccgtatctcggcgcgcgcttgagcctcaaccgcgcctccgtcgacttgggcggcagcgacagcttcagccaaacctccatcggcctcggcgtattgacgggcgtaagctatgccgttaccccgaatgtcgatttggatgccggctaccgctacaactacatcggcaaagtcaacactgtcaaaaacgtccgttccggcgaactgtccgtcggcgtgcgcgtcaaattctgatatgcgccttattctgcaaaccgccgagccttcggcggttttgttttctgccaccgcaactacacaagccggcggttttgtacgataatcccgaatgctgcggcttctgccgccctattttttgaggaatccgaaatgtccaaaaccatcatccacaccgaca

SEQ ID NO: 36 - protein, 174 aa, Neisseria meningitidis
MKKALATLIALALPAAALAEGASGFYVQADAAHAKASSSLGSAKGFSPRISAGYRINDLRFAVDYTRYKNYKAPSTDFKLYSIGASAIYDFDTQSPVKPYLGARLSLNRASVDLGGSDSFSQTSIGLGVLTGVSYAVTPNVDLDAGYRYNYIGKVNTVKNVRSGELSVGVRVKF

SEQ ID NO: 37 - protein, 352 aa, Homo sapiens [sequence omitted]

SEQ ID NO: 38 - DNA, 645 bp, Homo sapiens
  CDS (10)..(639)
cttgcagggatgctgcgcgcgggagaagtccacaccgggaccaccatcatggcagtggagtttgacgggggcgttgtgatgggttctgattcccgagtgtctgcaggcgaggcggtggtgaaccgagtgtttgacaagctgtccccgctgcacgagcgcatctactgtgcactctctggttcagctgctgatgcccaagccgtggccgacatggccgcctaccagctggagctccatgggatagaactggaggaacctccacttgttttggctgctgcaaatgtggtgagaaatatcagctataaatatcgagaggacttgtctgcacatctcatggtagctggctgggaccaacgtgaaggaggtcaggtatatggaaccctgggaggaatgctgactcgacagccttttgccattggtggctccggcagcacctttatctatggttatgtggatgcagcatataagccaggcatgtctcccgaggagtgcaggcgcttcaccacagacgctattgctctggccatgagccgggatggctcaagcgggggtgtcatctacctggtcactattacagctgccggtgtggaccatcgagtcatcttgggcaatgaactgccaaaattctatgatgagtgaaccttc

SEQ ID NO: 39 - protein, 209 aa, Homo sapiens
MLRAGEVHTGTTIMAVEFDGGVVMGSDSRVSAGEAVVNRVFDKLSPLHERIYCALSGSAADAQAVADMAAYQLELHGIELEEPPLVLAAANVVRNISYKYREDLSAHLMVAGWDQREGGQVYGTLGGMLTRQPFAIGGSGSTFIYGYVDAAYKPGMSPEECRRFTTDAIALAMSRDGSSGGVIYLVTITAAGVDHRVILGNELPKFYDE

SEQ ID NO: 40 - DNA, 2247 bp, Homo sapiens
  CDS (1)..(2247)
atggctagctctaggtgtcccgctccccgcgggtgccgctgcctccccggagcttctctcgcatggctggggacagtactgctacttctcgccgactgggtgctgctccggaccgcgctgccccgcatattctccctgctggtgcccaccgcgctgccactgctccgggtctgggcggtgggcctgagccgctgggccgtgctctggctgggggcctgcggggtcctcagggcaacggttggctccaagagcgaaaacgcaggtgcccagggctggctggctgctttgaagccattagctgcggcactgggcttggccctgccgggacttgccttgttccgagagctgatctcatggggagcccccgggtccgcggatagcaccaggctactgcactggggaagtcaccctaccgccttcgttgtcagttatgcagcggcactgcccgcagcagccctgtggcacaaactcgggagcctctgggtgcccggcggtcagggcggctctggaaaccctgtgcgtcggcttctaggctgcctgggctcggagacgcgccgcctctcgctgttcctggtcctggtggtcctctcctctcttggggagatggccattccattctttacgggccgcctcactgactggattctacaagatggctcagccgataccttcactcgaaacttaactctcatgtccattctcaccatagccagtgcagtgctggagttcgtgggtgacgggatctataacaacaccatgggccacgtgcacagccacttgcagggagaggtgtttggggctgtcctgcgccaggagacggagtttttccaacagaaccagacaggtaacatcatgtctcgggtaacagaggacacgtccaccctgagtgattctctgagtgagaatctgagcttatttctgtggtacctggtgcgaggcctatgtctcttggggatcatgctctggggatcagtgtccctcaccatggtcaccctggtcaccctgcctctgcttttccttctgcccaagaaggtgggaaaatggtaccagttgctggaagtgcaggtgcgggaatctctggcaaagtccagccaggtggccattgaggctctgtcggccatgcctacagttcgaagctttgccaacgaggagggcgaagcccagaagtttagggaaaagctgcaagaaataaagacactcaaccagaaggaggctgtggcctatgcagtcaactcctggaccactagtatttcaggtatgctgctgaaagtgggaatcctctacattggtgggcagctggtgaccagtggggctgtaagcagtgggaaccttgtcacatttgttctctaccagatgcagttcacccaggctttggaggtactgctctccatctaccccagagtacagaaggctgtgggctcctcagagaaaatatttgagtacctggaccgcacccctcgctgcccacccagtggtctgttgactcccttacacttggagggccttgtccagttccaagatgtctcctttgcctacccaaaccgcccagatgtcttagtgctacaggggctgacattcaccctacgccctggcgaggtgacggcgctggtgggacccaatgggtctgggaagagcacagtggctgccctgctgcagaatctgtaccagcccaccgggggacagctgctgttggatgggaagccccttccccaatatgagcaccgctacctgcacaggcaggtggctgcagtgggacaagagccacaggtatttggaagaagtcttcaagaaaatattgcctatggcctgacccagaagccaactatggaggaaatcacagctgctgcagtaaagtctggggcccatagtttcatctctggactccctcagggctatgacacagaggtaggcgaggctgggagccagctgtcagggggtcagcaacaggcagtggcgttggcccgagcattgatccggaaaccgtgtgtacttatcctggatgatgccaccagtgccctggatgcaaacagccagttacaggtggagcagctcctgtacgaaagccctgagcggtactcccgctcagtgcttctcatcacccagcacctcagcctggtggagcaggctgaccacatcctctttctggaaggaggcgctatccgggaggggggaacccaccagcagctcatggagaaaaaggggtgctactgggccatggtgcaggctcctgcagatgctccagaatga

SEQ ID NO: 41 - protein, 748 aa, Homo sapiens
MASSRCPAPRGCRCLPGASLAWLGTVLLLLADWVLLRTALPRIFSLLVPTALPLLRVWAVGLSRWAVLWLGACGVLRATVGSKSENAGAQGWLAALKPLAAALGLALPGLALFRELISWGAPGSADSTRLLHWGSHPTAFVVSYAAALPAAALWHKLGSLWVPGGQGGSGNPVRRLLGCLGSETRRLSLFLVLVVLSSLGEMAIPFFTGRLTDWILQDGSADTFTRNLTLMSILTIASAVLEFVGDGIYNNTMGHVHSHLQGEVFGAVLRQETEFFQQNQTGNIMSRVTEDTSTLSDSLSENLSLFLWYLVRGLCLLGIMLWGSVSLTMVTLVTLPLLFLLPKKVGKWYQLLEVQVRESLAKSSQVAIEALSAMPTVRSFANEEGEAQKFREKLQEIKTLNQKEAVAYAVNSWTTSISGMLLKVGILYIGGQLVTSGAVSSGNLVTFVLYQMQFTQALEVLLSIYPRVQKAVGSSEKIFEYLDRTPRCPPSGLLTPLHLEGLVQFQDVSFAYPNRPDVLVLQGLTFTLRPGEVTALVGPNGSGKSTVAALLQNLYQPTGGQLLLDGKPLPQYEHRYLHRQVAAVGQEPQVFGRSLQENIAYGLTQKPTMEEITAAAVKSGAHSFISGLPQGYDTEVGEAGSQLSGGQQQAVALARALIRKPCVLILDDATSALDANSQLQVEQLLYESPERYSRSVLLITQHLSLVEQADHILFLEGGAIREGGTHQQLMEKKGCYWAMVQAPADAPE

SEQ ID NO: 42 - DNA, 2085 bp, Homo sapiens
  CDS (65)..(2005)
gtgcagctcttgggttttttgtggcttccttcgttattggagccaggcctacaccccagcaaccatgtccaagggacctgcagttggtattgatcttggcaccacctactcttgtgtgggtgttttccagcacggaaaagtcgagataattgccaatgatcagggaaaccgaaccactccaagctatgtcgcctttacggacactgaacggttgatcggtgatgccgcaaagaatcaagttgcaatgaaccccaccaacacagtttttgatgccaaacgtctgattggacgcagatttgatgatgctgttgtccagtctgatatgaaacattggccctttatggtggtgaatgatgctggcaggcccaaggtccaagtagaatacaagggagagaccaaaagcttctatccagaggaggtgtcttctatggttctgacaaagatgaaggaaattgcagaagcctaccttgggaagactgttaccaatgctgtggtcacagtgccagcttactttaatgactctcagcgtcaggctaccaaagatgctggaactattgctggtctcaatgtacttagaattattaatgagccaactgctgctgctattgcttacggcttagacaaaaaggttggagcagaaagaaacgtgctcatctttgacctgggaggtggcacttttgatgtgtcaatcctcactattgaggatggaatctttgaggtcaagtctacagctggagacacccacttgggtggagaagattttgacaaccgaatggtcaaccattttattgctgagtttaagcgcaagcataagaaggacatcagtgagaacaagagagctgtaagacgcctccgtactgcttgtgaacgtgctaagcgtaccctctcttccagcacccaggccagtattgagatcgattctctctatgaaggaatcgacttctatacctccattacccgtgcccgatttgaagaactgaatgctgacctgttccgtggcaccctggacccagtagagaaagcccttcgagatgccaaactagacaagtcacagattcatgatattgtcctggttggtggttctactcgtatccccaagattcagaagcttctccaagacttcttcaatggaaaagaactgaataagagcatcaaccctgatgaagctgttgcttatggtgcagctgtccaggcagccatcttgtctggagacaagtctgagaatgttcaagatttgctgctcttggatgtcactcctctttcccttggtattgaaactgctggtggagtcatgactgtcctcatcaagcgtaataccaccattcctaccaagcagacacagaccttcactacctattctgacaaccagcctggtgtgcttattcaggtttatgaaggcgagcgtgccatgacaaaggataacaacctgcttggcaagtttgaactcacaggcatacctcctgcaccccgaggtgttcctcagattgaagtcacttttgacattgatgccaatggtatactcaatgtctctgctgtggacaagagtacgggaaaagagaacaagattactatcactaatgacaagggccgtttgagcaaggaagacattgaacgtatggtccaggaagctgagaagtacaaagctgaagatgagaagcagagggacaaggtgtcatccaagaattcacttgagtcctatgccttcaacatgaaagcaactgttgaagatgagaaacttcaaggcaagattaacgatgaggacaaacagaagattctggacaagtgtaatgaaattatcaactggcttgataagaatcagactgctgagaaggaagaatttgaacatcaacagaaagagctggagaaagtttgcaaccccatcatcaccaagctgtaccagagtgcaggaggcatgccaggaggaatgcctgggggatttcctggtggtggagctcctccctctggtggtgcttcctcagggcccaccattgaagaggttgattaagccaaccaagtgtagatgtagcattgttccacacatttaaaacatttgaaggacctaaattcgtagcaaattctgtggca

SEQ ID NO: 43 - protein, 646 aa, Homo sapiens
MSKGPAVGIDLGTTYSCVGVFQHGKVEIIANDQGNRTTPSYVAFTDTERLIGDAAKNQVAMNPTNTVFDAKRLIGRRFDDAVVQSDMKHWPFMVVNDAGRPKVQVEYKGETKSFYPEEVSSMVLTKMKEIAEAYLGKTVTNAVVTVPAYFNDSQRQATKDAGTIAGLNVLRIINEPTAAAIAYGLDKKVGAERNVLIFDLGGGTFDVSILTIEDGIFEVKSTAGDTHLGGEDFDNRMVNHFIAEFKRKHKKDISENKRAVRRLRTACERAKRTLSSSTQASIEIDSLYEGIDFYTSITRARFEELNADLFRGTLDPVEKALRDAKLDKSQIHDIVLVGGSTRIPKIQKLLQDFFNGKELNKSINPDEAVAYGAAVQAAILSGDKSENVQDLLLLDVTPLSLGIETAGGVMTVLIKRNTTIPTKQTQTFTTYSDNQPGVLIQVYEGERAMTKDNNLLGKFELTGIPPAPRGVPQIEVTFDIDANGILNVSAVDKSTGKENKITITNDKGRLSKEDIERMVQEAEKYKAEDEKQRDKVSSKNSLESYAFNMKATVEDEKLQGKINDEDKQKILDKCNEIINWLDKNQTAEKEEFEHQQKELEKVCNPIITKLYQSAGGMPGGMPGGFPGGGAPPSGGASSGPTIEEVD

SEQ ID NO: 44 - DNA, 3827 bp, Staphylococcus aureus
  CDS (151)..(3702)
atgcacttgtattcgttatactgtatatattttgcataataaaataataatatgaatttttgataaatttcattgaataagaactaaattagtttataatttattattagtatcctgtggatatgacatagagtataaggaggggtttttatgaacaaaaatgtgttgaagtttatggtctttataatgttattaaatatcatcacacctttatttaataaaaatgaagcatttgcagcacgagatatttcatcaacgaatgttacagatttaactgtatcaccgtctaagatagaagatggtggtaaaacgacagtaaaaatgacgttcgacgataaaaatggaaaaatacaaaatggtgacatgattaaagtggcatggccgacaagcggtacagtaaagatagagggttatagtaaaacagtaccattaactgttaaaggtgaacaggtgggtcaagcagttattacaccagacggtgcaacaattacattcaatgataaagtagaaaaattaagtgatgtttcgggatttgcagaatttgaagtacaaggaagaaatttaacgcaaacaaatacttcagatgacaaagtagctacgataacatctgggaataaatcaacgaatgttacggttcataaaagtgaagcgggaacaagtagtgttttctattataaaacgggagatatgctaccagaagatacgacacatgtacgatggtttttaaatattaacaatgaaaaaagttatgtatcgaaagatattactataaaggatcagattcaaggtggacagcagttagatttaagcacattaaacattaatgtgacaggtacacatagcaattattatagtggacaaagtgcaattactgattttgaaaaagcctttccaggttctaaaataactgttgataatacgaagaacacaattgatgtaacaattccacaaggctatgggtcatataatagtttttcaattaactacaaaaccaaaattacgaatgaacagcaaaaagagtttgttaataattcacaagcttggtatcaagagcatggtaaggaagaagtgaacgggaaatcatttaatcatactgtgcacaatattaatgctaatgccggtattgaaggtactgtaaaaggtgaattaaaagttttaaaacaggataaagataccaaggctcctatagctaatgtaaaatttaaactttctaaaaaagatggatcagttgtaaaggacaatcaaaaagaaattgagattataacagatgcaaacggtattgctaatattaaagcgttgcctagtggagactatattttaaaagaaatagaggcgccacgaccgtatacatttgataaggataaagaatatccgtttactatgaaagatacagataatcagggatattttacgactattgaaaatgcaaaagcgatagaaaaaacaaaagatgtttctgctcaaaaggtttgggaaggcactcaaaaagtgaaaccaacgatttatttcaagttgtacaaacaagatgacaatcaaaatacaacaccagtagacaaagcagagattaaaaaattagaagatggaacgacaaaagtgacatggtctaatcttccggaaaatgacaaaaatggcaaggctattaaatatttagttaaagaagtaaatgctcaaggtgaagatacaacaccagaaggatatactaaaaaagaaaatggtttagtggttactaatactgaaaaaccaatcgaaacaacatcaattagtggtgaaaaagtatgggacgacaaagacaatcaagatggtaagagaccagaaaaagtcagtgtgaatttattggctaacggggagaaagtaaaaacgttagacgtgacatctgaaacaaactggaagtacgaatttaaagacttaccgaagtatgatgaaggaaagaaaatagaatatacagtgaccgaagatcacgtaaaagactacacaacagacatcaacggtacgacaataacgaacaagtatacaccaggagagacatcggcaacagtaacaaaaaattgggatgacaataataaccaagacggaaaacgaccaactgaaatcaaagttgagttatatcaagatggaaaagcaacaggaaaaacggcaatattaaatgaatctaataactggacacatacgtggacaggattagatgaaaaagcaaaaggacaacaagtaaaatacacagtcgaggaattaacaaaggtcaaaggttatacaacacatgtggataacaatgatatgggtaacttgattgtgacgaataaatatacgccagaaacaacatcaattagtggtgaaaaagtatgggacgacaaagacaatcaagatggtaagagaccagaaaaagtcagtgtgaatttattggctgatggagagaaagtaaaaacgttagacgtgacatctgaaacaaactggaagtacgaatttaaagacttaccgaagtatgatgaaggaaagaaaatagaatatacagtgaccgaagatcacgtaaaagactacacaacagacatcaacggtacgacaataacgaacaagtatacaccaggagagacatcggcaacagtaacaaaaaattgggatgacaataataaccaagacggaaaacgaccaactgaaatcaaagttgagttatatcaagatggaaaagcaacaggaaaaacggcaatattaaatgaatctaataactggacacatacgtggacaggattagatgaaaaagcaaaaggacaacaagtaaaatacacagtcgaggaattaacaaaggtcaaaggttatacaacacatgtggataacaatgatatgggcaacttgattgtgacgaataaatatacgccagaaacaacatcaattagtggtgaaaaagtatgggacgacaaagacaatcaagatggtaagagaccagaaaaagtcagtgtgaatttattggctaacggagagaaagtaaaaacgttagacgtgacatctgaaacaaactggaagtacgaatttaaagacttaccgaagtatgatgaaggaaagaaaatagaatatacagtgaccgaagatcacgtaaaagactacacaacagacatcaacggtacgacaataacgaacaagtatacaccaggagagacatcggcaacagtaacaaaaaattgggatgacaataataaccaagacggaaaacgaccaactgaaatcaaagttgagttatatcaagatggaaaagcaacaggaaaaacggcaatattaaatgaatctaataactggacacatacgtggacaggattagatgaaaaagcaaaaggacaacaagtaaaatacacagtcgatgaattaacaaaagttaatggctatacaacgcatgtggataacaatgatatgggtaacttgattgtgacaaataaatatacgccgaaaaaaccgaataaaccaatctatcctgaaaaaccaaaagacaaaacaccaccaactaaacctgatcattctaataaagttaaaccaactcccccagataagccatcaaaagtggataaggatgatcaacctaaagataataaaaccaaacctgaaaatcctctaaaagaattaccaaaaactggtatgaagattataacttcatggattacatgggtatttataggtatattgggactgtatttaattttaagaaaaagatttaactcataaaccattataattatttttatagataaggctattcttagttctatgtataatacatgtatattaataggtcacttttaatctgtatgtaagcagactaagagtggccttttaaacaaataaaaaaa

SEQ ID NO: 45 - protein, 1183 aa, Staphylococcus aureus
MNKNVLKFMVFIMLLNIITPLFNKNEAFAARDISSTNVTDLTVSPSKIEDGGKTTVKMTFDDKNGKIQNGDMIKVAWPTSGTVKIEGYSKTVPLTVKGEQVGQAVITPDGATITFNDKVEKLSDVSGFAEFEVQGRNLTQTNTSDDKVATITSGNKSTNVTVHKSEAGTSSVFYYKTGDMLPEDTTHVRWFLNINNEKSYVSKDITIKDQIQGGQQLDLSTLNINVTGTHSNYYSGQSAITDFEKAFPGSKITVDNTKNTIDVTIPQGYGSYNSFSINYKTKITNEQQKEFVNNSQAWYQEHGKEEVNGKSFNHTVHNINANAGIEGTVKGELKVLKQDKDTKAPIANVKFKLSKKDGSVVKDNQKEIEIITDANGIANIKALPSGDYILKEIEAPRPYTFDKDKEYPFTMKDTDNQGYFTTIENAKAIEKTKDVSAQKVWEGTQKVKPTIYFKLYKQDDNQNTTPVDKAEIKKLEDGTTKVTWSNLPENDKNGKAIKYLVKEVNAQGEDTTPEGYTKKENGLVVTNTEKPIETTSISGEKVWDDKDNQDGKRPEKVSVNLLANGEKVKTLDVTSETNWKYEFKDLPKYDEGKKIEYTVTEDHVKDYTTDINGTTITNKYTPGETSATVTKNWDDNNNQDGKRPTEIKVELYQDGKATGKTAILNESNNWTHTWTGLDEKAKGQQVKYTVEELTKVKGYTTHVDNNDMGNLIVTNKYTPETTSISGEKVWDDKDNQDGKRPEKVSVNLLADGEKVKTLDVTSETNWKYEFKDLPKYDEGKKIEYTVTEDHVKDYTTDINGTTITNKYTPGETSATVTKNWDDNNNQDGKRPTEIKVELYQDGKATGKTAILNESNNWTHTWTGLDEKAKGQQVKYTVEELTKVKGYTTHVDNNDMGNLIVTNKYTPETTSISGEKVWDDKDNQDGKRPEKVSVNLLANGEKVKTLDVTSETNWKYEFKDLPKYDEGKKIEYTVTEDHVKDYTTDINGTTITNKYTPGETSATVTKNWDDNNNQDGKRPTEIKVELYQDGKATGKTAILNESNNWTHTWTGLDEKAKGQQVKYTVDELTKVNGYTTHVDNNDMGNLIVTNKYTPKKPNKPIYPEKPKDKTPPTKPDHSNKVKPTPPDKPSKVDKDDQPKDNKTKPENPLKELPKTGMKIITSWITWVFIGILGLYLILRKRFNS

SEQ ID NO: 46 - protein, 9 aa, Homo sapiens
  MISC_FEATURE (4)..(4): Xaa can be any amino acid
  MISC_FEATURE (6)..(7): Xaa can be any amino acid
ILVXYXXLV

SEQ ID NO: 47 - protein, 209 aa, Homo sapiens
MSPHPTALLGLVLCLAQTIHTQEEDLPRPSISAEPGTVIPLGSHVTFVCRGPVGVQTFRLERESRSTYNDTEDVSQASPSESEARFRIDSVSEGNAGPYRCIYYKPPKWSEQSDYLELLVKETSGGPDSPDTEPGSSAGPTQRPSDNSHNEHAPASQGLKAEHLYILIGVSVVFLFCLLLLVLFCLHRQNQIKQGPPRSKDEEQKPQQR

SEQ ID NO: 48 - protein, 410 aa, Homo sapiens
MSLMVVSMACVGFFLLEGPWPHVGGQDKPFLSAWPGTVVSEGQHVTLQCRSHLGFNEFSLSKEDGMPVPELYNRIFRNSFLMGPVTPAHAGTYRCCSSHPHSPTGWSAPSNPVVIMVTGVHRKPSLLAHPGPLVKSGETVILQCWSDVRFERFLLHREGITEDPLRLVGQLHDAGSQVNYSMGPMTPALAGTYRCFGSVTHLPYELSAPSDPLDIVVVGLYGKPSLSAQPGPTVQAGENVTLSCSSRSLFDIYHLSREAEAGELRLTAVLRVNGTFQANFPLGPVTHGGNYRCFGSFRALPHAWSDPSDPLPVSVTGNSRYLHALIGTSVVIIPFAILLFFLLHRWCANKKNAVVMDQEPAGNRTVNREDSDEQDPQEVTYAQLNHCVFTQRKITRPSQRPKTPPTDTSV

SEQ ID NO: 49 - protein, 237 aa, Homo sapiens
MTSEITYAEVRFKNEFKSSGINTASSAASKERTAPHKSNTGFPKLLCASLLIFFLLLAISFFIAFVIFFQKYSQLLEKKTTKELVHTTLECVKKNMPVEETAWSCCPKNWKSFSSNCYFISTESASWQDSEKDCARMEAHLLVINTQEEQDFIFQNLQEESAYFVGLSDPEGQRHWQWVDQTPYNESSTFWHPREPSDPNERCVVLNFRKSPKRWGWNDVNCLGPQRSVCEMMKIHL

SEQ ID NO: 50 - protein, 447 aa, Homo sapiens [sequence omitted]

SEQ ID NO: 51 - protein, 1709 aa, Homo sapiens
MGFLPKLLLLASFFPAGQASWGVSSPQDVQGVKGSCLLIPCIFSFPADVEVPDGITAIWYYDYSGQRQVVSHSADPKLVEARFRGRTEFMGNPEHRVCNLLLKDLQPEDSGSYNFRFEISEVNRWSDVKGTLVTVTEEPRVPTIASPVELLEGTEVDFNCSTPYVCLQEQVRLQWQGQDPARSVTFNSQKFEPTGVGHLETLHMAMSWQDHGRILRCQLSVANHRAQSEIHLQVKYAPKGVKILLSPSGRNILPGELVTLTCQVNSSYPAVSSIKWLKDGVRLQTKTGVLHLPQAAWSDAGVYTCQAENGVGSLVSPPISLHIFMAEVQVSPAGPILENQTVTLVCNTPNEAPSDLRYSWYKNHVLLEDAHSHTLRLHLATRADTGFYFCEVQNVHGSERSGPVSVVVNHPPLTPVLTAFLETQAGLVGILHCSVVSEPLATLVLSHGGHILASTSGDSDHSPRFSGTSGPNSLRLEIRDLEETDSGEYKCSATNSLGNATSTLDFHANAARLLISPAAEVVEGQAVTLSCRSGLSPTPDARFSWYLNGALLHEGPGSSLLLPAASSTDAGSYHCRARDGHSASGPSSPAVLTVLYPPRQPTFTTRLDLDAAGAGAGRRGLLLCRVDSDPPARLQLLHKDRVVATSLPSGGGCSTCGGCSPRMKVTKAPNLLRVEIHNPLLEEEGLYLCEASNALGNASTSATFNGQATVLAIAPSHTLQEGTEANLTCNVSREAAGSPANFSWFRNGVLWAQGPLETVTLLPVARTDAALYACRILTEAGAQLSTPVLLSVLYPPDRPKLSALLDMGQGHMALFICTVDSRPLALLALFHGEHLLATSLGPQVPSHGRFQAKAEANSLKLEVRELGLGDSGSYRCEATNVLGSSNTSLFFQVRGAWVQVSPSPELQEGQAVVLSCQVHTGVPEGTSYRWYRDGQPLQESTSATLRFAAITLTQAGAYHCQAQAPGSATTSLAAPISLHVSYAPRHVTLTTLMDTGPGRLGLLLCRVDSDPPAQLRLLHGDRLVASTLQGVGGPEGSSPRLHVAVAPNTLRLEIHGAMLEDEGVYICEASNTLGQASASADFDAQAVNVQVWPGATVREGQLVNLTCLVWTTHPAQLTYTWYQDGQQRLDAHSIPLPNVTVRDATSYRCGVGPPGRAPRLSRPITLDVLYAPRNLRLTYLLESHGGQLALVLCTVDSRPPAQLALSHAGRLLASSTAASVPNTLRLELRGPQPRDEGFYSCSARSPLGQANTSLELRLEGVRVILAPEAAVPEGAPITVTCADPAAHAPTLYTWYHNGRWLQEGPAASLSFLVATRAHAGAYSCQAQDAQGTRSSRPAALQVLYAPQDAVLSSFRDSRARSMAVIQCTVDSEPPAELALSHDGKVLATSSGVHSLASGTGHVQVARNALRLQVQDVPAGDDTYVCTAQNLLGSISTIGRLQVEGARVVAEPGLDVPEGAALNLSCRLLGGPGPVGNSTFAWFWNDRRLHAEPVPTLAFTHVARAQAGMYHCLAELPTGAAASAPVMLRVLYPPKTPTMMVFVEPEGGLRGILDCRVDSEPLASLTLHLGSRLVASSQPQGAPAEPHIHVLASPNALRVDIEALRPSDQGEYICSASNVLGSASTSTYFGVRALHRLHQFQQLLWVLGLLVGLLLLLLGLGACYTWRRRRVCKQSMGENSVEMAFQKETTQLIDPDAATCETSTCAPPLG

SEQ ID NO: 52 - protein, 847 aa, Homo sapiens
MHLLGPWLLLLVLEYLAFSDSSKWVFEHPETLYAWEGACVWIPCTYRALDGDLESFILFHNPEYNKNTSKFDGTRLYESTKDGKVPSEQKRVQFLGDKNKNCTLSIHPVHLNDSGQLGLRMESKTEKWMERIHLNVSERPFPPHIQLPPEIQESQEVTLTCLLNFSCYGYPIQLQWLLEGVPMRQAAVTSTSLTIKSVFTRSELKFSPQWSHHGKIVTCQLQDADGKFLSNDTVQLNVKHTPKLEIKVTPSDAIVREGDSVTMTCEVSSSNPEYTTVSWLKDGTSLKKQNTFTLNLREVTKDQSGKYCCQVSNDVGPGRSEEVFLQVQYAPEPSTVQILHSPAVEGSQVEFLCMSLANPLPTNYTWYHNGKEMQGRTEEKVHIPKILPWHAGTYSCVAENILGTGQRGPGAELDVQYPPKKVTTVIQNPMPIREGDTVTLSCNYNSSNPSVTRYEWKPHGAWEEPSLGVLKIQNVGWDNTTIACARCNSWCSWASPVALNVQYAPRDVRVRKIKPLSEIHSGNSVSLQCDFSSSHPKEVQFFWEKNGRLLGKESQLNFDSISPEDAGSYSCWVNNSIGQTASKAWTLEVLYAPRRLRVSMSPGDQVMEGKSATLTCESDANPPVSHYTWFDWNNQSLPHHSQKLRLEPVKVQHSGAYWCQGTNSVGKGRSPLSTLTVYYSPETIGRRVAVGLGSCLAILILAICGLKLQRRWKRTQSQQGLQENSSGQSFFVRNKKVRRAPLSEGPHSLGCYNPMMEDGISYTTLRFPEMNIPRTGDAESSEMQRPPRTCDDTVTYSALHKRQVGDYENVIPDFPEDEGIHYSELIQFGVGERPQAQENVDYVILKH

SEQ ID NO: 53 - protein, 32 aa, Homo sapiens
  MISC_FEATURE (2)..(2): Xaa is Ile or Leu
  MISC_FEATURE (3)..(3): Xaa can be any amino acid
  MISC_FEATURE (6)..(6): Xaa can be any amino acid
  MISC_FEATURE (8)..(25): Xaa can be any amino acid
  MISC_FEATURE (26)..(26): Xaa is Thr or Asn
  MISC_FEATURE (31)..(31): Xaa is Ile or Val
  MISC_FEATURE (32)..(32): Xaa is Lys or Arg
EXXYAXLXXXXXXXXXXXXXXXXXXXEYSEXX

SEQ ID NO: 54 - protein, 6 aa, Homo sapiens
  MISC_FEATURE (1)..(1): Xaa is Thr or Asn
  MISC_FEATURE (6)..(6): Xaa is Ile or Val
XEYSEX

SEQ ID NO: 55 - protein, 442 aa, Homo sapiens
MLPLLLPLLWAGALAQERRFQLEGPESLTVQEGLCVLVPCRLPTTLPASYYGYGYWFLEGADVPVATNDPDEEVQEETRGRFHLLWDPRRKNCSLSIRDARRRDNAAYFFRLKSKWMKYGYTSSKLSVRVMALTHRPNISIPGTLESGHPSNLTCSVPWVCEQGTPPIFSWMSAAPTSLGPRTTQSSVLTITPRPQDHSTNLTCQVTFPGAGVTMERTIQLNVSYAPQKVAISIFQGNSAAFKILQNTSSLPVLEGQALRLLCDADGNPPAHLSWFQGFPALNATPISNTGVLELPQVGSAEEGDFTCRAQHPLGSLQISLSLFVHWKPEGRAGGVLGAVWGASITTLVFLCVCFIFRVKTRRKKAAQPVQNTDDVNPVMVSGSRGHQHQFQTGIVSDHPAEAGPISEDEQELHYAVLHFHKVQPQEPKVTDTEYSEIKIHK

SEQ ID NO: 56 - protein, 626 aa, Homo sapiens
MIFLTALPLFWIMISASRGGHWGAWMPSSISAFEGTCVSIPCRFDFPDELRPAVVHGVWYFNSPYPKNYPPVVFKSRTQVVHESFQGRSRLLGDLGLRNCTLLLSNVSPELGGKYYFRGDLGGYNQYTFSEHSVLDIVNTPNIVVPPEVVAGTEVEVSCMVPDNCPELRPELSWLGHEGLGEPAVLGRLREDEGTWVQVSLLHFVPTREANGHRLGCQASFPNTTLQFEGYASMDVKYPPVIVEMNSSVEAIEGSHVSLLCGADSNPPPLLTWMRDGTVLREAVAESLLLELEEVTPAEDGVYACLAENAYGQDNRTVGLSVMYAPWKPTVNGTMVAVEGETVSILCSTQSNPDPILTIFKEKQILSTVIYESELQLELPAVSPEDDGEYWCVAENQYGQRATAFNLSVEFAPVLLLESHCAAARDTVQCLCVVKSNPEPSVAFELPSRNVTVNESEREFVYSERSGLVLTSILTLRGQAQAPPRVICTARNLYGAKSLELPFQGAHRLMWAKIGPVGAVVAFAILIAIVCYITQTRRKKNVTESPSFSAGDNPPVLFSSDFRISGAPEKYESERRLGSERRLLGLRGEPPELDLSYSHSDLGKRPTKDSYTLTEELAEYAEIRVK

SEQ ID NO: 57 - protein, 551 aa, Homo sapiens
MLPLLLLPLLWGGSLQEKPVYELQVQKSVTVQEGLCVLVPCSFSYPWRSWYSSPPLYVYWFRDGEIPYYAEVVATNNPDRRVKPETQGRFRLLGDVQKKNCSLSIGDARMEDTGSYFFRVERGRDVKYSYQQNKLNLEVTALIEKPDIHFLEPLESGRPTRLSCSLPGSCEAGPPLTFSWTGNALSPLDPETTRSSELTLTPRPEDHGTNLTCQMKRQGAQVTTERTVQLNVSYAPQTITIFRNGIALEILQNTSYLPVLEGQALRLLCDAPSNPPAHLSWFQGSPALNATPISNTGILELRRVRSAEEGGFTCRAQHPLGFLQIFLNLSVYSLPQLLGPSCSWEAEGLHCRCSFRARPAPSLCWRLEEKPLEGNSSQGSFKVNSSSAGPWANSSLILHGGLSSDLKVSCKAWNIYGSQSGSVLLLQGRSNLGTGVVPAALGGAGVMALLCICLCLIFFLIVKARRKQAAGRPEKMDDEDPIMGTITSGSRKKPWPDSPGDQASPPGDAPPLEEQKELHYASLSFSEMKSREPKDQEAPSTTEYSEIKTSK

SEQ ID NO: 58 - protein, 364 aa, Homo sapiens
MPLLLLLPLLWAGALAMDPNFWLQVQESVTVQEGLCVLVPCTFFHPIPYYDKNSPVHGYWFREGAIISGDSPVATNKLDQEVQEETQGRFRLLGDPSRNNCSLSIVDARRRDNGSYFFRMERGSTKYSYKSPQLSVHVTDLTHRPKILIPGTLEPGHSKNLTCSVSWACEQGTPPIFSWLSAAPTSLGPRTTHSSVLIITPRPQDHGTNLTCQVKFAGAGVTTERTIQLNVTYVPQNPTTGIFPGDGSGKQETRAGLVHGAIGGAGVTALLALCLCLIFFIVKTHRRKAARTAVGSNDTHPTTGSASPKHQKNSKLHGPTETSSCSGAAPTVEMDEELHYASLNFHGMNPSKDTSTEYSEVRTQ

SEQ ID NO: 59 - protein, 467 aa, Homo sapiens
MLLLLLLPLLWGRERVEGQKSNRKDYSLTMQSSVTVQEGMCVHVRCSFSYPVDSQTDSDPVHGYWFRAGNDISWKAPVATNNPAWAVQEETRDRFHLLGDPQTKNCTLSIRDARMSDAGRYFFRMEKGNIKWNYKYDQLSVNVTALTHRPNILIPGTLESGCFQNLTCSVPWACEQGTPPMISWMGTSVSPLHPSTTRSSVLTLIPQPQHHGTSLTCQVTLPGAGVTTNRTIQLNVSYPPQNLTVTVFQGEGTASTALGNSSSLSVLEGQSLRLVCAVDSNPPARLSWTWRSLTLYPSQPSNPLVLELQVHLGDEGEFTCRAQNSLGSQHVSLNLSLQQEYTGKMRPVSGVLLGAVGGAGATALVFLSFCVIFIVVRSCRKKSARPAADVGDIGMKDANTIRGSASQGNLTESWADDNPRHHGLAAHSSGEEREIQYAPLSFHKGEPQDLSGQEATNNEYSEIKIPK

SEQ ID NO: 60 - protein, 524 aa, Homo sapiens
MYALFLLASLLGAALAGPVLGLKECTRGSAVWCQNVKTASDCGAVKHCLQTVWNKPTVKSLPCDICKDVVTAAGDMLKDNATEEEILVYLEKTCDWLPKPNMSASCKEIVDSYLPVILDIIKGEMSRPGEVCSALNLCESLQKHLAELNHQKQLESNKIPELDMTEVVAPFMANIPLLLYPQDGPRSKPQPKDNGDVCQDCIQMVTDIQTAVRTNSTFVQALVEHVKEECDRLGPGMADICKNYISQYSEIAIQMMMHMQPKEICALVGFCDEVKEMPMQTLVPAKVASKNVIPALELVEPIKKHEVPAKSDVYCEVCEFLVKEVTKLIDNNKTEKEILDAFDKMCSKLPKSLSEECQEVVDTYGSSILSILLEEVSPELVCSMLHLCSGTRLPALTVHVTQPKDGGFCEVCKKLVGYLDRNLEKNSTKQEILAALEKGCSFLPDPYQKQCDQFVAEYEPVLIEILVEVMDPSFVCLKIGACPSAHKPLLGTEKCIWGPSYWCQNTETAAQCNAVEHCKRHVWN

SEQ ID NO: 61 - protein, 527 aa, Homo sapiens
MYALFLLASLLGAALAGPVLGLKECTRGSAVWCQNVKTASDCGAVKHCLQTVWNKPTVKSLPCDICKDVVTAAGDMLKDNATEEEILVYLEKTCDWLPKPNMSASCKEIVDSYLPVILDIIKGEMSRPGEVCSALNLCESLQKHLAELNHQKQLESNKIPELDMTEVVAPFMANIPLLLYPQDGPRSKPQPKDNGDVCQDCIQMVTDIQTAVRTNSTFVQALVEHVKEECDRLGPGMADICKNYISQYSEIAIQMMMHMQDQQPKEICALVGFCDEVKEMPMQTLVPAKVASKNVIPALELVEPIKKHEVPAKSDVYCEVCEFLVKEVTKLIDNNKTEKEILDAFDKMCSKLPKSLSEECQEVVDTYGSSILSILLEEVSPELVCSMLHLCSGTRLPALTVHVTQPKDGGFCEVCKKLVGYLDRNLEKNSTKQEILAALEKGCSFLPDPYQKQCDQFVAEYEPVLIEILVEVMDPSFVCLKIGACPSAHKPLLGTEKCIWGPSYWCQNTETAAQCNAVEHCKRHVWN

SEQ ID NO: 62 - protein, 208 aa, Sus scrofa
ALLAEHLLKPLPADKQIETGPFLEAVSHLPPFFDCLGSPVFTPIKADISGNITKIKAVYDTNPAKFRTLQNILEVEKEMYGAEWPKVGATLALMWLKRGLRFIQVFLQSICDGERDENHPNLIRVNATKAYEMALKKYHGWIVQKIFQAALYAAPYKSDFLKALSKGQNVTEEECLEKVRLFLVNYTATIDVIYEMYTKMNAELNYKV

SEQ ID NO: 63 - protein, 209 aa, Homo sapiens
MALLAEHLLKPLPADKQIETGPFLEAVSHLPPFFDCLGSPVFTPIKADISGNITKIKAVYDTNPAKFRTLQNILEVEKEMYGAEWPKVGATLALMWLKRGLRFIQVFLQSICDGERDENHPNLIRVNATKAYEMALKKYHGWIVQKIFQAALYAAPYKSDFLKALSKGQNVTEEECLEKIRLFLVNYTATIDVIYEMYTQMNAELNYKV

SEQ ID NO: 64 - protein, 276 aa, Homo sapiens
MGNSMKSTPAPAERPLPNPEGLDSDFLAVLSDYPSPDISPPIFRRGEKLRVISDEGGWWKAISLSTGRESYIPGICVARVYHGWLFEGLGRDKAEELLQLPDTKVGSFMIRESETKKGFYSLSVRHRQVKHYRIFRLPNNWYYISPRLTFQCLEDLVNHYSEVADGLCCVLTTPCLTQSTAAPAVRASSSPVTLRQKTVDWRRVSRLQEDPEGTENPLGVDESLFSYGLRESIASYLSLTSEDNTSFDRKKKSISLMYGGSKRKSSFFSSPPYFED

SEQ ID NO: 65 - protein, 18 aa, Homo sapiens
KRFKQDGGWSHWSPWSSC

SEQ ID NO: 66 - protein, 18 aa, Homo sapiens
KRAKAAGGWSHWSPWSSC

SEQ ID NO: 67 - DNA, 1784 bp, Staphylococcus aureus
  CDS (184)..(1635)
tcgaaatagcgtgattttgcggttttaagccttttacttcctgaataaatctttcagcaaaatatttattttataagttgtaaaacttacctttaaatttaattataaatatagattttagtattgcaatacataattcgttatattatgatgactatacaaatacatacagggggtattaatttgaaaaagaaaaacatttattcaattcgtaaactaggtgtaggtattgcatctgtaactttaggtacattacttatatctggtggcgtaacacctgctgcaaatgctgcgcaacacgatgaagctcaacaaaatgctttttatcaagtcttaaatatgcctaacttaaatgctgatcaacgcaatggttttatccaaagccttaaagatgatccaagccaaagtgctaacgttttaggtgaagctcaaaaacttaatgactctcaagctccaaaagctgatgcgcaacaaaataacttcgacaaagatcaacaaagcgccttctatgaaatcttgaacatgcctaacttaaacgaagcgcaacgtaacggcttcattcaaagtcttaaagacgacccaagccaaagcactaacgttttaggtgaagctaaaaaattaaacgaatctcaagcaccgaaagctgataacaatttcaacaaagaacaacaaaatgctttctatgaaatcttgaatatgcctaacttaaacgaagaacaacgcaatggtttcatccaaagcttaaaagatgacccaagccaaagtgctaacctattgtcagaagctaaaaagttaaatgaatctcaagcaccgaaagcggataacaaattcaacaaagaacaacaaaatgctttctatgaaatcttacatttacctaacttaaacgaagaacaacgcaatggtttcatccaaagcctaaaagatgacccaagccaaagcgctaaccttttagcagaagctaaaaagctaaatgatgctcaagcaccaaaagctgacaacaaattcaacaaagaacaacaaaatgctttctatgaaattttacatttacctaacttaactgaagaacaacgtaacggcttcatccaaagccttaaagacgatccttcggtgagcaaagaaattttagcagaagctaaaaagctaaacgatgctcaagcaccaaaagaggaagacaataacaagcctggcaaagaagacaataacaagcctggcaaagaagacaataacaagcctggcaaagaagacaacaacaagcctggcaaagaagacaacaacaagcctggtaaagaagacaacaacaagcctggcaaagaagacggcaacaagcctggtaaagaagacaacaaaaaacctggtaaagaagatggcaacaagcctggtaaagaagacaacaaaaaacctggtaaagaagacggcaacaagcctggcaaagaagatggcaacaaacctggtaaagaagatggtaacggagtacatgtcgttaaacttggtgatacagtaaatgacattgcaaaagcaaacggcactactgctgacaaaattgctgcagataacaaattggctgataaaaacatgatcaaacttggtcaagaacttgttgttgataagaagcaaccacaaaccatgcagagctaacaaagctcaagcattatcagaaactggcgaagaaaatccattcatcggtacaactgtatttggtggattatcattagccttaggtgcagcgttattagctggacgtcgtcgcgaactataaaaacaaacaatacacaacgatagatatc

SEQ ID NO: 68 - protein, 483 aa, Staphylococcus aureus
LKKKNIYSIRKLGVGIASVTLGTLLISGGVTPAANAAQHDEAQQNAFYQVLNMPNLNADQRNGFIQSLKDDPSQSANVLGEAQKLNDSQAPKADAQQNNFDKDQQSAFYEILNMPNLNEAQRNGFIQSLKDDPSQSTNVLGEAKKLNESQAPKADNNFNKEQQNAFYEILNMPNLNEEQRNGFIQSLKDDPSQSANLLSEAKKLNESQAPKADNKFNKEQQNAFYEILHLPNLNEEQRNGFIQSLKDDPSQSANLLAEAKKLNDAQAPKADNKFNKEQQNAFYEILHLPNLTEEQRNGFIQSLKDDPSVSKEILAEAKKLNDAQAPKEEDNNKPGKEDNNKPGKEDNNKPGKEDNNKPGKEDNNKPGKEDNNKPGKEDGNKPGKEDNKKPGKEDGNKPGKEDNKKPGKEDGNKPGKEDGNKPGKEDGNGVHVVKLGDTVNDIAKANGTTADKIAADNKLADKNMIKLGQELVVDKKQPQTMQS

SEQ ID NO: 69 - DNA, 279 bp, Homo sapiens
  CDS (1)..(279)
gtgaagcccaaggcctggctgtcccgtggccccagtcctggccctggccgtctgctgctggtgtgccatgtctcaggattctacccaaagcctgtatgggtgaagtggatgcggggtgagcaggagcagcagggcactcagccaggggacatcctgcccaatgctgacgagacatggtatctccgagcaaccctggatgtggtggctggggaggcagctggcctgtcctgtcgggtgaagcacagcagtctagagggccaggacatcgtcctctactgg

SEQ ID NO: 70 - protein, 93 aa, Homo sapiens
VKPKAWLSRGPSPGPGRLLLVCHVSGFYPKPVWVKWMRGEQEQQGTQPGDILPNADETWYLRATLDVVAGEAAGLSCRVKHSSLEGQDIVLYW

SEQ ID NO: 71 - DNA, 1873 bp, Mus musculus
  CDS (173)..(175)
  CDS (273)..(314)
  CDS (315)..(1367)
aggaagggacagggtgacaccccaggattacataaatttacaggggctgccgaattggtcgaacaagcccgtggaacctggaagccagagaacaccatcgctgtaaaggaaagaaactgaagcttttctcggagcctatctgggctgctcaaactttcagaatctaccgaccatggtgagtcagacagactgtcttggggtggaactggagccaacctgaggaatctcagggtcctggcaggagtctccctgtccccctactttctcctcaggagcgtgtgcttggcttgttgctgttgcttctggtgcacgcctctcccgccccaccagagccctgcgagctagacgaggaaagttgctcctgcaacttctcagatccgaagccagattggtccagcgctttcaattgtttgggggcggcagatgtggaattgtacggcggcggccgcagcctggaataccttctaaagcgtgtggacacggaagcagatctggggcagttcactgatattatcaagtctctgtccttaaagcggcttacggtgcgggccgcgcggattcctagtcggattctattcggagccctgcgtgtgctcgggatttccggcctccaggaactgactcttgaaaatctcgaggtaaccggcaccgcgccgccaccgcttctggaagccaccggacccgatctcaacatcttgaacctccgcaacgtgtcgtgggcaacaagggatgcctggctcgcagaactgcagcagtggctaaagcctggactcaaggtactgagtattgcccaagcacactcactcaacttttcctgcgaacaggtccgcgtcttccctgccctctccaccttagacctgtctgacaatcctgaattgggcgagagaggactgatctcagccctctgtcccctcaagttcccgaccctccaagttttagcgctgcgtaacgcggggatggagacgcccagcggcgtgtgctctgcgctggccgcagcaagggtacagctgcaaggactagaccttagtcacaattcactgcgggatgctgcaggcgctccgagttgtgactggcccagtcagctaaactcgctcaatctgtctttcactgggctgaagcaggtacctaaagggctgccagccaagctcagcgtgctggatctcagttacaacaggctggataggaaccctagcccagatgagctgccccaagtggggaacctgtcacttaaaggaaatccctttttggactctgaatcccactcggagaagtttaactctggcgtagtcaccgccggagctccatcatcccaagcagtggccttgtcaggaactctggctttgctcctaggagatcgcctctttgtttaaggaacatttgcatcctcctggtttctgagggtcctcgtcaacgaatcctctgctttaaatttattaaaatcttaatccacgatgtaaggaaagaaaggcagtcaagatggttcagtgggtaaaagccagcaaacttgacccctgattttaaccctcaggatccacacggaaggggaaaactcactcctgaaagttgtccatctgtgctcacaaataaatattttttaaaataacaatgtgtttgttggttttgtttttgtttgggttttgttgtggttttgtttgttttgttttgtttttgagacagtctggctatgtatccttggctggcctcaaactcataaagatcaagatcggcctgcctctacctccaaatgctctggttaaagggatgtgcctccatgcccagttgaagtcatcctgaaccacgagtccaggccactcactctttactaagatctttactaagtatctgccataggtcaggctcagtgctaaatgag

SEQ ID NO: 72 - protein, 366 aa, Mus musculus
MERVLGLLLLLLVHASPAPPEPCELDEESCSCNFSDPKPDWSSAFNCLGAADVELYGGGRSLEYLLKRVDTEADLGQFTDIIKSLSLKRLTVRAARIPSRILFGALRVLGISGLQELTLENLEVTGTAPPPLLEATGPDLNILNLRNVSWATRDAWLAELQQWLKPGLKVLSIAQAHSLNFSCEQVRVFPALSTLDLSDNPELGERGLISALCPLKFPTLQVLALRNAGMETPSGVCSALAAARVQLQGLDLSHNSLRDAAGAPSCDWPSQLNSLNLSFTGLKQVPKGLPAKLSVLDLSYNRLDRNPSPDELPQVGNLSLKGNPFLDSESHSEKFNSGVVTAGAPSSQAVALSGTLALLLGDRLFV

SEQ ID NO: 73 - protein, 365 aa, Mus musculus
MDKFWWHTAWGLCLLQLSLAHPHQQIDLNVTCRYAGVFHVEKNGRYSISRTEAADLCQAFNSTLPTMDQMKLALSKGFETCRYGFIEGNVVIPRIHPNAICAANHTGVYILVTSNTSHYDTYCFNASAPPEEDCTSVTDLPNSFDGPVTITIVNRDGTRYSKKGEYRTHQEDIDASNIIDDDVSSGSTIEKSTPESYILHTYLPTEQPTGDQDDSFFIRSTLATRDRDSSKDSRGSSRTVTHGSELAGHSSANQDSGVTTTSGPMRRPQIPEWLIILASLLALALILAVCIAVNSRRRCGQKKKLVINGGNGTVEDRKPSELNGEASKSQEMVHLVNKEPSETPDQCMTADETRNLQSVDMKIGV

SEQ ID NO: 74 - protein, 371 aa, Mus musculus
MNVKGKVILLMLIVSTVVVVFWEYVNSPDGSFLWIYHTKIPEVGENRWQKDWWFPSWFKNGTHSYQEDNVEGRREKGRNGDRIEEPQLWDWFNPKNRPDVLTVTPWKAPIVWEGTYDTALLEKYYATQKLTVGLTVFAVGKYIEHYLEDFLESADMYFMVGHRVIFYVMIDDTSRMPVVHLNPLHSLQVFEIRSEKRWQDISMMRMKTIGEHILAHIQHEVDFLFCMDVDQVFQDNFGVETLGQLVAQLQAWWYKASPEKFTYERRELSAAYIPFGEGDFYYHAAIFGGTPTHILNLTRECFKGILQDKKHDIEAQWHDESHLNKYFLFNKPTKILSPEYCWDYQIGLPSDIKSVKVAWQTKEYNLVRNNV

SEQ ID NO: 75 - DNA, 79 bp, Homo sapiens
  CDS (3)..(77)
gcagtttaacgggggaggggactcagccccagcattttggtgatgggactcgactctccatcctagaggacctgaacaa

SEQ ID NO: 76 - protein, 25 aa, Homo sapiens
SLTGEGTQPQHFGDGTRLSILEDLN

SEQ ID NO: 77 - DNA, 1197 bp, Streptococcus pyogenes
  CDS (106)..(1119)
attggctctggagatggattataaagagattgcagatgccaaaggtgcaactatcacaggggcatggtcagacagtccacaaattatattagacggaggtaaaaaatgagtgaaaatataccgctgcgagtccaatttaagcgcatgaaagccgccgagtgggctcgtagtgatgtcatcttactggagagcgagataggctttgagacagacacaggttttgccagagcaggtgatgggcacaatcgatttagtgaccttggatacattagtccactcgattacaatctactgactaacaagccaaatattgatggattagcgacaaaagtcgagaccgctcagaaactacaacaaaaagcagataaagagaccgtctatacaaaagctgaatcgaagcaagagcttgacaagaaattaaatctcaaaggtggcgttatgacaggtcaactaaaatttaagccagccgccactgttgcttattcctcgtcaacgggtggagcggtcaatattgacttgtcgtctaccagaggtgctggtgttgttgtctattctgacaatgataccagtgatgggccgttaatgagcttgcggacgggtaaagagacctttaatcaatcggcgctttttgtcgactataaggggacaacaaatgccgttaatattgcgatgcgtcacgcaaccacccccaatttttcatcggcgcttaatattactagcggcaatgaaaatggtagtgcaatgcagctacgagggtcagaaaaagcgctaggaacgctaaaaattactcatgagaacccaagtattggagcggattatgataaaaatgcggcacgttatccattgatattgtcaaaaagacaaaacggtgcaggaacagccgctcagggaatctacattaactcaacctcaggcacgacagggaagttgcttaggattagaaaccttagtgatgataagttctacgtcaagtctgacggtggtttttatgccaaggaaacttcgcagattgatggcaacctgaaactcaaggaccccacagcgaatgatcatgcggcaaccaaagcttatgtagataaagcaatttctgagttaaaaaaactcatactaaaaaaatagattaaggaggataaatgagcagagacccaacacttattttagacgagtcaaacctcgttattggtaaggatggacgtg

SEQ ID NO: 78 - protein, 337 aa, Streptococcus pyogenes
MSENIPLRVQFKRMKAAEWARSDVILLESEIGFETDTGFARAGDGHNRFSDLGYISPLDYNLLTNKPNIDGLATKVETAQKLQQKADKETVYTKAESKQELDKKLNLKGGVMTGQLKFKPAATVAYSSSTGGAVNIDLSSTRGAGVVVYSDNDTSDGPLMSLRTGKETFNQSALFVDYKGTTNAVNIAMRHATTPNFSSALNITSGNENGSAMQLRGSEKALGTLKITHENPSIGADYDKNAARYPLILSKRQNGAGTAAQGIYINSTSGTTGKLLRIRNLSDDKFYVKSDGGFYAKETSQIDGNLKLKDPTANDHAATKAYVDKAISELKKLILKK

SEQ ID NO: 79 - DNA, 1497 bp, Bacteriophage T270
  CDS (286)..(1374)
gaagacattgtaaaatacaatacaattatgagagatcaatataaaaaaggtagcaatgaatataatgcgtttcaacaagatattgagcaagataaaaaccagatagcactattgttcaacgaacatcaattgcttgaaaatatcgataattagttaatctaaaacaaaaagccccacgctctcaaagtttggcgactctgagcgtgaggcaagacagtataagaaacaaccattaaaaaggtcattttcttgtacctattttatcaaattgaaagatggtatgcaatgaaaattaaatcatataaaaaggaaaatggtgaaactgcttataaatttcttttgtatgccggttatgttaatggaaagagaaaatatattaggcgagaaggtttcaaaactaagcaggctgcaagggaaaccttaattagtttacaagctgaacttgataaacctaaatcaagtatgacatttggagcattgacagatcaatggctaaaggaatatgaaaaaaccgttcagggcagtacctacttaaaaacagaaagaaatattaataaacatattttgccaaaacttgataaagtgaagattggagacatcaatccactacttatccagcggcttactgaagaatggtgcaacgatttaaaatatggaggaaaaattcttgggcttgttaggaatatcttaaatctagctgttagatacggatatatcaataacaatccagctttgccaattacacctccaaaaataaaaaggaaaagaaaaatgaataataatttttatacacttgatcaacttaaacaattccttgaactagttgaaaaaactgacaacattgaaaaaatagccttgtttagattattagcatttactggaatacgaaaaggggagcttctggcactaacttgggatgatttgaatggtaatactctatcaattaataaagctgtcacacgtactcaagttggactagaaatagatgttacgaagacaaaatcaagcgatagattaatcagcttagatgatgaaactttggaaattttacaagaacttcatgaaacttttcctacttctactcttatgttccaatctaaatcaggtggaattatgacgccaagtttaccacgaaaatggctattgcaaattatcaaagggatagacttaccacaaatcacaattcatggtttcaggcacactcatgcaagcttacttttcgaatcaggtctatccttgaaacaggtgcaacatagattagggcatggagatttacagacaactatgaacgtatatactcacatcacgcaatcggcaattgatgacattggaactaaattcaatcaatttgttactaacaagcaactagattgacaactaattctcaacaaacgttaatttaacaacattcaagtaactcccaccagctccatcaatgcttaccgtaagtaatcataacttactaaaaccttgttacatcaaggttttttctttttg

SEQ ID NO: 80 - protein, 362 aa, Bacteriophage T270
MKIKSYKKENGETAYKFLLYAGYVNGKRKYIRREGFKTKQAARETLISLQAELDKPKSSMTFGALTDQWLKEYEKTVQGSTYLKTERNINKHILPKLDKVKIGDINPLLIQRLTEEWCNDLKYGGKILGLVRNILNLAVRYGYINNNPALPITPPKIKRKRKMNNNFYTLDQLKQFLELVEKTDNIEKIALFRLLAFTGIRKGELLALTWDDLNGNTLSINKAVTRTQVGLEIDVTKTKSSDRLISLDDETLEILQELHETFPTSTLMFQSKSGGIMTPSLPRKWLLQIIKGIDLPQITIHGFRHTHASLLFESGLSLKQVQHRLGHGDLQTTMNVYTHITQSAIDDIGTKFNQFVTNKQLD

SEQ ID NO: 81 - DNA, 2187 bp, Staphylococcus aureus
  CDS (752)..(1744)
atcgataactttctttgttccatttttaaagtaaacagtatatttcgcttgcttcgatagtcttaaatctatatcactaatacctctgtctgattttaaaactgatttaactctatcctctaaatctttataactaatattttgattcttattaaatgttaagcttgataaaatattttggcttgtaccgttcacagtgattgcatatggaacatggactttagaatatccatggtgtaacgaacttgatgatttatctaatggcttagctgcggcagacgcttcattattattaaagtttgcacctgttgatgctaaaacacctaatgctaaagttgttgtaatcaatgacttaaatttcataaattatctctccttttttgtgtaattcgtatttgcaacttaattatagccagactttctctattttttgaattaactgaatattaataataaattatctttaacaataattttttaacactgttaaaagttcttttaattttgattaactaattaatttacaatacctaaaatgttgtttggttttgtttataccaagcttcaaacttaaatgtcataacaacattcatttcttaattccgattagatttgtcgattatatttacagcatctttatactcaaaaaacatttacttaaaaatataaattctatttaataattaatttaaatttagttaatcaattttgcatctattttgttgtaagctatataaaaggagtgataatgatggtgaaaaaaacaaaatccaattcactaaaaaaagttgcaacacttgcattagcaaatttattattagttggtgcacttactgacaatagtgccaaagccgaatctaagaaagatgatactgatttgaagttagttagtcataacgtttatatgttatcgaccgttttgtatccaaactgggggcaatataaacgcgctgatttaatcggacaatcttcttatattaaaaataatgatgtcgtaatattcaatgaagcatttgataatggtgcatcagacaaattattaagtaatgtgaaaaaagaatatccttatcaaacacctgtactcggccgttctcaatcagggtgggacaaaactgaaggtagctactcatcaactgttgcagaagatggtggcgtagcgattgtaagtaaatatcctattaaagaaaaaatccagcatgttttcaaaagcggttgtggattcgataatgatagcaacaaaggctttgtttatacaaaaatagagaaaaatggtaagaacgttcacgttatcggtacacatacacaatctgaagattcacgttgtggtgctggacatgatcgaaaaattagagctgaacaaatgaaagaaatcagtgactttgttaaaaagaaaaatatccctaaagatgaaacggtatatataggtggcgaccttaatgtcaataaaggcactccagagttcaaagatatgcttaaaaacttgaatgtaaatgatgttctatatgcaggtcataatagcacatgggaccctcaatcaaattcaattgcgaaatataattaccctaatggtaaaccagaacatttagactatatatttacagataaagatcataaacaaccaaaacaattagtcaatgaagttgtgactgaaaaacctaagccatgggatgtatatgcgttcccatattactacgtttacaatgatttttcagatcattacccaatcaaagcctatagtaaatagtgctcaactaactaataactttgcttcgttctaaaaggacgaagcgagttatattgttaaaatttgaattgacttacattttaataaaatcatcttaacaactttaatttttcattaatacaagtctttactctacactcaaacaagattcatacactgcacgtcataataaatctatctattcaaatataaataaaagttacctactacattctatgtagcaggcaacttttattacttatttcttttcattatcattaagtacttttacaaacttcacattatgtgtcttccaatcaacttcatataatgctgataatttttcttcttttttatctacatggttttcaccagaccaatagccccagaaaccatggcgattccaatctattttaaactcatccattgatcgtttaactctaacgtgtcgcatggaaatcgat

SEQ ID NO: 82 - protein, 330 aa, Staphylococcus aureus
MVKKTKSNSLKKVATLALANLLLVGALTDNSAKAESKKDDTDLKLVSHNVYMLSTVLYPNWGQYKRADLIGQSSYIKNNDVVIFNEAFDNGASDKLLSNVKKEYPYQTPVLGRSQSGWDKTEGSYSSTVAEDGGVAIVSKYPIKEKIQHVFKSGCGFDNDSNKGFVYTKIEKNGKNVHVIGTHTQSEDSRCGAGHDRKIRAEQMKEISDFVKKKNIPKDETVYIGGDLNVNKGTPEFKDMLKNLNVNDVLYAGHNSTWDPQSNSIAKYNYPNGKPEHLDYIFTDKDHKQPKQLVNEVVTEKPKPWDVYAFPYYYVYNDFSDHYPIKAYSK

SEQ ID NO: 83 - DNA, 17276 bp, Streptococcus agalactiae
  CDS (7062)..(8207)
acaatctcaggactgtttatttttatgattaaacgaaacttcctctaataaatagtcaataaatttttgtcccatttttgaaaggtttgctttgtcgtgtcggatatagacaatatcaataacatcatccacgtcaagagggattgcgacaatttcgtcaccgttcaattttgagttgaggataccagttgccactgtataaccatctaatccaatcattaaattaaacagagttgctctatcactgacaacaatggattttgggtgaggaatttgagacatcatttcctcagaaaagtagaaagaattatgcaggccttgatcataactcagataaggataatcttctaaatctttcatacttaatttttttctattagctaagggattggatttgctcacgaaaatatgaggtgtagtagtaaaaagagttgtggcaattaaggaattatcgtcgaataatttggttaatacatctctattatagctattaagaaacagaacaccaatctctgaacggaaatttttaacatcatcaataatttcccaagtcctagtttcacgtaaaaaaagttcgtattgggtcatgtctgtgccattaaagagagctacaaaagcgttaaccacaaatgcatagtgttgtgaagaaacgctgaacagctcacgacttgtattatcacccttataacgctcttcaagaagtgctgtttgttctagaatttgtcgcgcatatgacagaaattccataccatcttttgttaacgttattccttttggatttcgaataaaaatttggatacccatctcagtctcaaggttcctaacagcgtttgaaagtgaaggttgggtaatgtagagttgtttagcggcttcattcatgctaccagtttctacaatcttaataacatattgtaattgttgaattctcataattctagtttaaactagaatgtaaataaattcaattagatcagctaaattatcaatatagatcaattgaaaatgttatttagctaatataatcagattattccaatattattttcgttgaatattgtattgaaaaatgatataatatccaagtaaaattaaggtttttttaagtattggagaattacaatgtctaatcattcgcgccgtcaccaaaagaaacactcacatacacctctacgggtgattaatttatttcttttggtgatttttattttgttaagtgtagtctcattatttcttatgtatcgtcaccattttttggcatttagacacttgaacgtcatttatggagttgtaattattttaatcattttagcaagtttatttctttgtattaagaataaagctagaatttttacaactataattttagtactatcctctattttcgttgctactactttatatggatttaagtcaaccattgatttgacaaataatctaaataaaactgcttcatactctgaaattgagatgagtgtagttgtaccaaaagattctaaaataaccaatatagaagctgtcagcaaattagccgcaccagttaaaaacgatacttcaaatattactgatttgatagaacatataaaatcagaaaaaggaatctctattacaccacaaaaaacagattcttaccaggatgcatacaatagaattaaaaatggtgatagtcaagctatggttttaaataatgcttatgttagcttaattgaacttagtacccctgattttaaatcgcagataaaaacgatttatacttacaaaattaagaaaaaaattaatcgtaaaaatactaatcataaagaaggggtatttaatatctatattagcggtattgatacttttggctctatatcaacagtatcaagatctgatgtaaatattattatgacggttaataccaatacccacaaagtattgttaacgacaacaccacgagatgcctatgtaaaaattccagatggtgggggcaatcaatatgataaattaacccatgcaggtttgtatggtgttgagacatcaatgaaaacacttgaaaacctttacgacatcaaccttgattattatgctagaattaatttttcatcattttttaaaattaatagacctcttgggaggagtgacagtttatatacgatcaagcttttacaagtaaacatggtaattttggactttcctgttggtcaagtaacattgaattctgagcaggctttgggctttgttagagaacgttattctctacaaggaggcgataacgatagaggtagaaatcaagaaaaagtgattgcagctattataaataagttagcttctagtcagtcagtaacaaaattaaatagcattacctcacagctccaaacgtccgttcaaactaatatgactattgataatattaatgatttgattaacaatcaattgtcaactggacaacgcttcactgtcgagtcacaagcattaactggtcatggttcaacgggtgaactcccttcatatgcaatgccaggagctcaactttatatgatgtcaattgatcaatctagcttatctaatgcaaaatcaaaaattaagaacacaatggaggaataacaagaatgattgatattcattctcatatcgtttttgatgtagatgatgggcccaaaacgcttgaagagagtttatctttaatagaagaaagttatcgacaaggtgttagaataattgtttcgacatcacatagaagaaaaggtatgtttgaaacacctgaagatattatcttcaaaaacttttctatagttaaacacgaaacggaaaaaagatttgaacatcttcaaatcttatatggtggagaattatactatacaagtgatatgttagaaaaactgaagttaaagcaaattccaactttaaacaatacgaaatttgctttaattgaattttctatgcaaacttcttggaaagatattcatacagctttgtcaaatgttttaatgcttggtattacaccagtcgttgcgcatatagagaggtataacgctttagagaatcaaaaagaacgggtgaaggaaattattaatatggggtgttacacacaaataaatagtttccatattttgaaacaaaaactttttaatgataagcataaacgctttaagaaaagagcccgttattttttagaggaaaatttagtgcattttgtagcgagtgatatgcataaccttgatgttagaccgccatttttagcagaagcttataagattatctgtagagatttcggtaaagaacgtgctaaccaactttttattgaaaatgctcaatctatattaaaaaaccattacatttaggagatttcatgaataaaatagctaatacagaagttgaaataaatatattcaaccttttaaaaaaattgtggaaaaagaaatttttaatcacatttgttgccattgcgtttgcaacagctggacttttctatagtctttttattgttacgccacaatatacttcttcaacaaggatatatgtcattaaccctaatacccctaataatagtattactgcacaagatctacaagcggggagttttcttgcaaatgactataaggagattattacgtctactgacgttctagaaaaagttatttcttctgaaaaattgaattatccttcgtctcagttgctacaaaaaataacagtttctattttaaaagatacacgtgttatttcaatatcggtcgaagatgctaatccaaaaatgtctcaaaaattagcaaattcagttagagaagcagcagtttcaaaaatcaaggcagttactcaagtagaggatatcactactcttgagaagggaaatttacctaaagcaccatcttctcctaatattaaaaagaatgtactaatcgggtttattgttggtgcaggattatcaactattgttttagttattatggggattttggatgatcgtgttaatactgaagaagatattgaaaaggtcttaggacttacttctttaggtatagtaccagatttgaataaactttaaggagaatataatgactcgtttagaaatagttgatagcaagttaagacaagcaaaaaaaacagaagaatacttcaatgcgatccgtacaaacatacagtttagtggaaaggaaaataaaattcttgcaattgcctctgttagggaaggggaaggaaaatccactacttcaacaagtttagctttatctttagctcaagcaggatttaaaacattattaattgatgcggatactaggaactctgttatgtctggaacctttaaagcaactggaactattaaaggcttgacgaattatttatcaggtaatgcagatcttggagatattatctgtgaaaccaatgttcctagactgatggtcgttccttcaggaaaagtaccaccaaatccaacagcattacttcagaacgcttattttaataagatgattgaagctattaaaaatatatttgattatattatcatcgatactccacctattggtttagttgttgatgccgcaataatcgctaatgcttgcgatggttttattttagtaacccaagcaggcagaataaaacgtaattatgttgaaaaagcaaaagaacagatggaacaaagtggttcaaagttcttaggtattattcttaataaagttaatgaatctgttgctacttacggcgattatggaaattacggaaaaagggatagaaaaaggaagtaagggactctggtattgaaagaaaaagaaaatatacaaaagattattatagcgatgattcaaacagttgtagtttatttttctgcaagtttgacattaacattaattactcccaattttaaaagcaataaagatttattgtttgttctattgatacattatattgttttttatctttctgatttttacagagacttttggagtcgtggctatcttgaagagtttaaaatggtattgaaatacagcttttactatattttcatatcaagttcattattttttatttttaaaaactcttttacaacgacacgactttccttttttacttttattgctatgaattcgattttattatatctattgaattcatttttaaaatattatcgaaaatattcttacgctaagttttcacgagataccaaagttgttttgataacgaataaggattctttatcaaaaatgacctttaggaataaatacgaccataattatatcgctgtctgtatcttggactcctctgaaaaggattgttatgatttgaaacataactcgttaaggataataaacaaagatgctcttacttcagagttaacctgcttaactgttgatcaagcttttattaacatacccattgaattatttggtaaataccaaatacaagatattattaatgacattgaagcaatgggagtgattgtcaatgttaatgtagaggcacttagctttgataatataggagaaaagcgaatccaaacttttgaaggatatagtgttattacatattctatgaaattctataaatatagtcaccttatagcaaaacgatttttggatatcacgggtgctattataggtttgctcatatgtggcattgtggcaatttttctagttccgcaaatcagaaaagatggtggaccggctatcttttctcaaaatagagtaggtcgtaatggtaggatttttagattctataaattcagatcaatgcgagtagatgcagaacaaattaagaaagatttattagttcacaatcaaatgacagggctaatgtttaagttagaagatgatcctagaattactaaaataggaaaatttattcgaaaaacaagcatagatgagttgcctcaattctataatgttttaaaaggcgatatgagtttagcaggaacacgccctcccacagttgatgaatatgaaaagtataattcaacgcagaagcgacgccttagttttaagccaggaatcactggtttgtggcaaatatctggtagaaataatattactgattttgatgaaatcgtaaagttagatgttcaatatatcaatgaatggtctatttggtcagatattaagattattctcctaacactaaaggtagttttactcgggacaggagctaagtaaaggtaaggtttgaaaggaatataatgaaaatttgtctggttggttcaagtggtggtcatctagcacacttgaaccttttgaaacccatttgggaaaaagaagataggttttgggtaacctttgataaagaagatgctaggagtattctaagagaagagattgtatatcattgcttctttccaacaaaccgtaatgtcaaaaacttggtaaaaaatactattctagcttttaaggtccttagaaaagaaagaccagatgttatcatatcatctggtgccgctgtagcagtaccattcttttatattggtaagttatttggttgtaagaccgtttatatagaggttttcgacaggatagataaaccaactttgacaggaaaattagtgtatcctgtaacagataaatttattgttcagtgggaagaaatgaaaaaagtttatcctaaggcaattaatttaggaggaattttttaatgatttttgtcacagtggggacacatgaacagcagttcaaccgtcttattaaagaagttgatagattaaaagggacaggtgctattgatcaagaagtgttcattcaaacgggttactcagacttcgaacctcagaattgtcagtggtcaaaatttctctcatatgatgatatgaactcttacatgaaagaagctgagattgttatcacacatggcggcccagcgacgtttatgtcagttatttctttagggaaattaccagttgttgttcctaggagaaagcagtttggtgaacatatcaatgatcatcaaatacaatttttaaaaaaaattgcccacctgtatcccttggcttggattgaagatgtagatggacttgcggaagcgttgaaaaggaatatagctacagaaaaatatcagggaaataatgatatgttttgtcataaattagaaaaaattataggtgaaatatgaggaaatatctagatttagattattctttattttatgctctttgggtacttattttagtaccaaaccaatggtatcagtttttaattattaccattatagttctattattactttggaagagtgagtttagaatatctataagcaattcttcaatactatttctgctttggttatttatttatttatttgcaatactcattagaggtactcaagaggatataacgtttcagcgatttattgctgagctattaaaactaattagtacaggatatgctttatttttttataattattatagaaaagctgattttaatagttcagttgtaaggaatgtggtaaaggttaactattttgtgttgtttcttataacagttttatatttattttttcctatgctgaagccaactttatttggaagagaattgttttcaatagagtggtttccacatatgagaataagacttgcggcatattttgaatatgctacactaattggtcagtttattttattttcttatcccatactttttttgaaaccccaaaaacatatggaaaatattttaatatccttactgttgactatatgttcatacttttctggcgctagaatactattggtctgtatgttggttttattagcatcgcttcttttagattatatcctttttaaaactaatttgaaattgaccaagaaaaacacttttatacttggtatgactttcttatttatcaccgcttgtttttcttataacatatggtcaataattgaaaaaataattatgtacagaaaccaaagtactatcactaggatgatagtttatcaagaaagtattattgaagttctaaaaggaaatattttatttggacagggtataaggattccatcaagtgaaggaatattcctaggatcgcattctacttatattagtgtcttttacaggacttctttattaggaattgttctttatttttctgcctttatacttttatataaagaagcgatttcaaaaaattataaaatctacagattatttttttatacgttattatgttacacgctctttgaggaaatagatcctaatcattggagtattgtattattattctcaacttttggtatagtgggaagggctaaaaaatgaaagaaaaagtaacagtcattatacctatatacaactcagaagcataccttaaagaatgtgtgcaatccgtactacaacagactcatccattgatagaagttatactaattgatgatggatccactgataatagtggagaaatttgtgataatttatctcaggaagataatcgcatacttgtatttcataaaaaaaatggaggggtctcttcggcaaggaacctaggtctagataaatccacaggagaattcataacatttgtggatagtgatgattttgtagcaccgaatatgattgaaataatgttaaaaaatttaatcactgagaatgctgatatagcagaagtagattttgatatttcgaatgagagagattatagaaagaagaaaagacgaaacttttataaagtttttaagaataataactctttgaaagaatttttatcaggtaatagagtggaaaatattgtttgtacaaaattatataaaaaaagtataattggtaacttgaggtttgatgagaacttaaaaattggtgaggatttactttttaattgcaaactcttatgtcaagagcaccgtatagtcgtagatacgacttcttccttatatacttatcgaattgtaaaaacttctgtaatgaatcagaaattcaacgaaaactcattagattttataacaatttttaatgaaataagtagtttggttcctgccagattagctaattatgttgaagcgaaatttttaagagaaaagataaagtgtctccgaaaaatgtttgaattaggtagtaatattgacaataaaatcaaagtacaacgagagatttttttcaaagacattaaatcatacccgttctataaagcggtcaaatacttatcattaaagggattattaagcttttatttaatgaaatgttcacctaaactatatgttatggcatatagaagatttcaaaaacagtagctggagaaatttggaaagagaatttataacttcatgataaagaaaattgaaaaggatttaataagtgtaattgtacctatttataatgttgaagattatttagttgaatgtatagaaagccttattgttcaaacatatcgaaatattgaaatattattgattaatgatggttcgacggataattgtgcaacaattgccaaagaattttctgaaagagattgtagagttatctatatagaaaagtcgaatggtgggttgtcagaagctagaaactatggaatttatcattcaaagggaaaatacttaacttttgttgattcagatgataaagtttcctctgattacatagcgaatttgtataatgctattcaaaaacatgattcgtctatagctatcggtggctatttagaattttatgaaagacataatagcataagaaattatgaatatttagacaaagtgatatcagttgaagaagcactactaaacatgtatgacattaaaacttatggttcaatttttattactgcatggggaaaattattccataaatctatattcaatgatttagaatttgcattaaataagtatcatgaggatgagttctttaactataaagcatacttaaaagctaattctataacatacatagacaagcctctctatcattatcgtatacgagtaggtagtatcatgaataatagtgataatgttataattgctagaaagaaacttgatgttttatcagcattagacgagcgaataaaacttataacaagtttacgtaagtattccgtttttttacaaaaaacagaaatattttatgtcaatcaatattttaggactaaaaaatttttaaaacaacaatctgtaatgtttaaagaagataactatatcgatgcttatagaatgtatggacggttacttagaaaagtgaagttagttgataaattaaaacttataaaaaataggtttttctagaaatggctgtttaatagttgtaatgtgagtgaccacgaattgttggataactatcaaaaagactaatttaggggaaaaataaaatgactaattttgtttgtcatactttataccatctactgattactataataaagttaaaagataaagaaaatactagaatatttatttgtgacactatcacggattatgaaacttgggtaaagatattaaatgatcagggaataagaactgaatcatttaaagagtttgcttatcgggagcagttacaaaataaaaatattgaagaagtgatggagcttgtagattcagacttaaatcactactttgagagagtagatacacaagtctatctatttaatgatgatactttaataggtcgctatatggtgtatttaggtaaaaattatcatctaattgaagatggttataactgttttcaagccaagttattcttgggtggttctgtcgtaaaacgagtaattaaaacttacttatttaaaaagtatgttccgtatggtttttcaaaatattgtctctcaattgaggttaattctttagtggggttacctcatgacataaggagtaagaaatataaagaactaccgagaaaaaaattatttgatagtcttaacaaagaacaaaaatcactgattttcaaaatatttaaaacaaaaccattaactataactccaaagtcagtattattgttgacacagccacttgcacaagataaatgttataaaacacctacagagaggtttcaaagtattcaagagcaatacgattattttgacgatattgtccaggaatatagaacgttagggtacaatgtttatttaaaagttcatcctagagatgtagtagattattccaaattgccggtagagctattaccatcaaatgttcctatggaaattatagagttgatgtcaacaggtcggttcgaatgtgggataacacattcgtccactgcgctggattttttaacttgtgttgataaaaaaataactttagtagatctgaaggatattaaatgaatactaagaaattacttcaatctggttttatttatacactcgggaatttattggtgcaaggattagcctttatcacacttcccatctatactcgggttatctcaacagaagtttatggccaatatagtttatatgtcgcttggatgaatattattatgctttttattggccttcagacgagcggttctttaagttcagcccgggtcaaatacggagaagaatttaaaagctattcagggagtgccttttctgtaggtaatatatggtttcttattatacttttgatagcttttctatttagaagttttcttgcaccattagttggtttttctgaatctatttttttattaatggtgtgtcaaagttacgctagctatgtggtgactttctttggtcagtattttatacaacaacagaggagtttggctaatttaatattatccttagccaatgcagtttcatctgttgcactatctctatttttaatttttcattggtccgatgactttttatctagggtttttggagcttttgttcctactataataactggaatagttgcctttgcttatatttattatcatagcaaatctttttacaatcctaagtattttcggttcattgtcactgtgtctgttcccttgattttccatttgttaggacaccagttgttggggcaattagatagaattatgctagctcgtttatacaatactaaagaagttgcaatgtatagtttcggttattcgcttggaatgattattcagattgttttgaatagtattaatatggcttggattccatggttttttgatgctagaaaagaaaaattactgcaactttcaacttatattagccgttatctctacttaggagttttcttaacattaggttatttgactgtttttcctgagttagctcaaataatgggaggagacaagtatagtagtagtgttcaatttatttctttaattattgtcagctactttttagtttttctctatacatttcctgtaaatatccaattcttctatgctaatacgacatggattcctattgggacattattagctgctggtgtaaattggttactaaaccttgtattaattcctcattatgcagcctatggcgctgctatggctacaataatatcttatttagccttgttgatttttcatcatattgtttcgaaagttaaataccattattcagatgtctcagttaggcagtacatcattttaagtggtatagtatttagttatgctatgttaatgaacatgttcctagataatatcgttattagatggagtttaggaataattattcttatagtatatagcattgtttttcaaaaagtcattttagacttattgagtaaaaaaagaaggagaagataatggtttatattattgcagagattggttgcaatcataatggagatattaatcttgcgaaaaaaatggtagatgttgccgtgtcttgtggtgttgatgctgttaaatttcagacttttaaagctgagaaacttatttctaaatttgctcccaaagctgaatatcaaaaagcaactacaggaacagcagacagtcaacttgagatgacgaaacgtttagagttaagctttgaagaatacttagaaatgcgtgattatgcaatttcaaaaggtgtggagaccttttcaacaccttttgatgaagagtcattagagttcttaatttctacagatatgccaatttacaaaattccatcaggagaaatcactaatttaccttacttagaaaagattggcaagcaacaaaagaaagttattctttcgacgggtatggcggtaatggaagagatccatcaagcggtgaatattttacgtcagaatggtacaaccgacatttctattttacattgtacaacagagtacccaacaccttacccctctctaaatttaaacgttattcatactttgaaagatgaatttaaagatttaacgataggttattcggatcattcaattggatcagaagtacctatcgcagcagcagcaatgggtgcagaagttattgaaaaacactttactttagatactaatatggaaggtccggatcataaagccagtgcaacacctgatattttagctgctttagttaaaggggttcgcattgttgaacaagccttaggtagatttgaaaaaatcccagatccagtagaagagaaaaataagattgttgctcgtaaatcagtcgttgctttaaaaccaattaaaaaaggcgatatttattcaatagaaaatattacggtgaagcgcccaggtaatggtatttctcctatgaactggtatgacatcttgggacaagaagcgcaagatgatttcgaagaggatgaagttattcgtgattcacgctttgaaaatcaattgcccgagttataataacacctaattataatcggcaacagatgtattacacggctaagattatgtaattactatatatagaagggatacgatgaaaaaaatttgtttagtaaccggatcgcgtgctgaatacggaataatgaagccattgattcaaagattatcaaaagataaagaagtcaacttacaaattattgcaacagcaatgcatctggaagaaaagtacggctatacttatcgtcaaattgaagaagacggttttgatattgcttataaagttcccttacatctttatgatactgacagaagaactgtatctactgcaatggcgcatttacaactaggattgaccaaaatttttgacaaggaagactatgatctagtcatcattttaggggatcgttacgaaatgttaccagttgtgaatgtagcgttgatttataatgtcccagtatgccaccttcatggaggggagacctcattaggcaattttgatgagtatattcgccatgcaattactaagatgagtcacctacacttagtctctacagaggactttcgtcaacgtgtgattcagatgggagaacaacctcaatttgtaattaacacaggagctctcggagtggaaaatgctctatcaatcccttctctaaccaaagaagcaatagaaaagcaattaggtattgtactagaggaatcctattttgttgttctctatcatcctgttacttttgaacaaggaaaaagtgctggagaacagatgaaagcggtactatcagccctttctaaatttggtgtccagtgtctatttataggatccaattcagatactggttctgatgatattgcaaaggctatcaatacttatttgataaatcatgaaaatagttattgctttgcttctttatcaacccaactttatcattccttaattcgtcattcactaggactgattggtaattcgtcttctggtttaatagaagttccttctttgatgaaacctactcttaatattggtgatcgccaaaaaggtaggctacatggagaaagtgtagtaagtgtaccagtcgaaaccccctctgtattggagggattatcaaaattgaatgaagtgaccaactttgacaatccctactacaaagagaatgcttcatctattgcatatgaagcaataaagctttatttgaaagatgaaccttcaatttcccaaccattttatgatttaaaggagaataatctaaaatgaaaaaaaagttggcatttttaggcgcaggaagtcatgctgatgcgattgctccggttattgatcctcttgtgtatgatttcgtaggtttttttgatgataaagatattacggagcatgatggttatcctgttcttggaaaactttatgatgtgctaccttaccttgaagatggctcaatagatgcagtatttattacaataggtgataatgctaaaaggaaagaactatttgaatatgtagcaaaggattattatgactttattattaacatcattagtcccaatgctttagtattgacaccagatagtatttgtgggcgtggtatctttattggttttggggcttttataggttctaaagtgaagctgtttgataacaacgttgttaatacaggagcgctcattgaacatcatactgttgtagaatcacactgtaatatagcacctaatgctaccataaatggtctttgttatattagagaagaagtttatgtaggtagtgccagtgttattattcaaaccttggatatttcatcgtgtacgacaattggcgcaggagctgttgttgtaaaagatattatagaacctggaacctatgtaggggttccagccaaaaaaataaaataaaggatatgttatgaagccaatttgtattattcctgcgcgatcagggtcaaaaggattaccagataagaatatgttattcctagcaggtaaacccatgattttccatactatagatgctgcaattgaatctggaatgtttgataagaaagatatttttgttagtacagattcagaattgtacagagagatttgtttagaacgcggtatttcagtggtgatgagaaaaccggaactttcaactgatcaggcaacttcgtatgatatgttaaaagattttttatctgactatgaagataatcaggagtttgtgttacttcaagtaacctctccactaagaaaatcatggcatataaaggaagcaatggagtattattcttcacatgatgttgacaatgttgtaagtttttctgaagttgagaaacaccctggtctgtttacgacattgtctgataaaggctatgctatagatatggtgggagcagataaaggttatcgtcgccaagatttacaacctttatactatccgaacggcgctatttttatttctaataaagaaacttacttaagggaaaaaagctttttcacctctaggacatatgcttatcaaatggcaaaggaattttcattagatgttgatacgagagatgattttatccacgtcatcggtcacctctttttcgattatgccattagggaaaaagagaataaagttttttataaagaaggctatagtcgtttgttcaatagagaagcttcaaagataattttaggtgattcaaaaacgatatctatctcactagaaaattaccataattattcccaaggtggtgtaacattagcaacgatgttggaaaacttacctaactttttgacagctaatgtaacagaggcttttgtttctataggggtaaatgatctcattacaggttatagtgtggaagaaatattcagcaatttccaaaaactctactcattattagctgagaataaaataaagatgagatttacaactattgcttacaccctttttagagaaactgtcaataatgcagatattgagaaaatcaatcaatggctaacagaattttgttatcaaaatcagattccactgttagatattaatagatttttatcaaaggatggtaatctaaattatcatttaactagtgatggattgcattttgactcaagaggctaatgatttgtaacaaagtcaatatcaattatttgtagacgaagttaaaaccttataatatttattttataaaattattcatcttattttggcgatttcaatagtgatatggtatatttaaagtaagctacgtatagttttaccagtcagaaatagtaaggatggttgagtatgagagaaactgaaacacacgatcaccaagcgctaattcaaaaattgttagtcagtattcattatttaaccttgtttcgtgatgaaattatattagtagaaaaaaccccatctttactggggaaacatttttctattgctattgtgcagaatgaactaggtgagatactttctaaaatagaagctttgagtaagcaaaaaaaactgattcgttctatttattggtatgatgaatcgtcatttaaagtcatgaataaggctctggctattgtagaagaatggattaagggcttagataatcttttagaattctgtcaatcacagacggtttttcaagcaattttaggtgatgaacgtgcacatgtatttggaatccttattgatgtttatacttctttaaacattataaatacttctttgaaagaagaaaattctaga

SEQ ID NO: 84 - protein, 381 aa, Streptococcus agalactiae
MRKYLDLDYSLFYALWVLILVPNQWYQFLIITIIVLLLLWKSEFRISISNSSILFLLWLFIYLFAILIRGTQEDITFQRFIAELLKLISTGYALFFYNYYRKADFNSSVVRNVVKVNYFVLFLITVLYLFFPMLKPTLFGRELFSIEWFPHMRIRLAAYFEYATLIGQFILFSYPILFLKPQKHMENILISLLLTICSYFSGARILLVCMLVLLASLLLDYILFKTNLKLTKKNTFILGMTFLFITACFSYNIWSIIEKIIMYRNQSTITRMIVYQESIIEVLKGNILFGQGIRIPSSEGIFLGSHSTYISVFYRTSLLGIVLYFSAFILLYKEAISKNYKIYRLFFYTLLCYTLFEEIDPNHWSIVLLFSTFGIVGRAKK

SEQ ID NO: 85 - DNA, 3042 bp, Staphylococcus aureus
  CDS (149)..(2296)
actattgtatattgcaaagctaattaactataacaaaaagatagttaatgctttgtttattctagttaatatatagttaatgtcttttaatattttgtttctttaatgtgtagattgggcaattacattttggaggaattaaaaaattatgaaaaagcaaataatttcgctaggcgcattagcagttgcatctagcttatttacatgggataacaaagcagatgcgatagtaacaaaggattatagcaaagagtcaagagtgaatgagaacagtaaatatgggacattaatttcagactggtatttaaaagggagattaactagtctagaatctcaatttatcaatgcattggatattttagagacatatcattatggcgaaaaagagtataaagatgcaaaagataaattgatgacaagaattttaggggaagaccaataccttttagaaagaaaaaaagtgcagtatgaggaatacaaaaaattataccaaaaatataaagaagagaatccaacctctaaaggcttaaaactgaaaacattcgatcaatatacaatagaagatttaactatgagggaatataatgagttaacagaatcattaaaaagtgctgtaaaagactttgagaaagatgttgaaaaaatagaaaatcaacatcatgatttgaaaccatttactgatgaaatggaagagaaggctacttctagagttgatgatttagcaaataaagcatatagtgtttattttgcatttgttagggatacacaacataaaactgaggcattagagttaaaagcgaaagtagatttagttttaggtgatgaggataaaccgcatcgtatttctaatgaaagaattgaaaaagaaatgataaaagatttagaatctattattgaagatttctttatagaaactggtttaaataagcctggtaatattacgagttatgatagtagtaaacatcactataaaaatcacagtgaaggttttgaggctctagtcaaagaaacaagagaagcagtagcaaacgctgacgaatcttggaaaactaaaactgtaaaaaaatacggtgaatctgaaacaaaatctcctgttgtaaaagaagagaacaaagttgaagaccctcaatcacctaaatttgataaccaacaagaggttaaaactacggctggtaaagctgaagaaacaacacaaccagttgcacaaccattagttaaaattccacagggcacaattacaggtgaaattgtgaaaggtccggaatatccaacgatggaaaataaaacgttacaaggtgaaatcgttcaaggtccagatttcccaacaatggaacaaagcggtccatctttaagcgacaattatactcaaccgacgacaccgaaccctattttagaaggtcttgaaggtagctcatctaaacttgaaataaaaccacaaggtactgaatcaacgttgaaaggtattcaaggagaatcaagtgatattgaagttaaacctcaagcaactgaaacaacagaagcttctcaatatggtccgagaccgcaatttaacaaaacacctaagtatgtgaaatatagagatgctggtacaggtattcgtgaatacaacgatggaacatttggatatgaagcgagaccaagattcaacaagccatcagaaacaaacgcatacaacgtaacgacaaatcaagatggcacagtatcatacggcgcccgcccaacacaaaacaaggcatcagaaacaaacgcatataacgtaacaacacatgcaaacggccaagtatcatacggagctcgcccaacacaaaagaagccaagcgaaacaaatgcatataacgtaacaacacatgcaaacggccaagtatcatatggcgcccgcccgacatacaacaagccaagcgaaacaaatgcatataacgtaacaacacacggaaatggccaagtatcatatggagctcgtccgacatacaagaaaccaagtaaaacaaatgcatataacgtaacaacacatgcaaacggccaagtgtcatacggagctcgcccaacacaaaacaagccaagcgaaacaaacgcatataacgtaacaacacatgcaaatggccaagtatcatacggagctcgcccaacacaaaacaagccaagcgaaacaaacgcatataacgtaacaacacacggaaacggtcaagtgtcatacggcgctcgtccgacatacaacaagccaagtaaaacaaatgcatacaatgtaacaacacatgcagatggtactgcgacatatggtcctagagtaacaaaataagtttataactctatccatagacatacagtcaatacaatacaaaacattacgtatctttacaacagtaatcatgcattctatgatgcttctaactgaattaaagcatcgaacaatcgaaagcatatttctaaattatttattcattatagtcttaaacataacatgacctaatatattactaacctattaaaataaaccacgcacatctatgtgatatacgacaatcacagcaataataattgctttagaaagtcgtaccgaactggaacttacaagtctagttcgaacacactgatgtgagtggttttctttattttaaacatgaacaatcagataagttactagcattagcaaatattattaaatcaaagggcttcgattcataaaatttaaaacaatgattaaaattagacgtgtaaatgttaaattctaaaacggaaatacccgctatcctattaaaccactttttggttcaatcactatatttcacacagcttcaataataaaacgaaactgcttcaatccgcttcaacttcaacctacctcattcagtaaccaaacgaatccgcttcatccaaaatcaaccattctaacgcacatactcaaatatagcagctgcacccataccgacaccaatacacatcgtaaccatgccgtaacggctatcgggacgtctacccatttcattaagtaaacgcgcggttaacattgctcctgtagcacctaatggatgacctaaagcaata

SEQ ID NO: 86 - protein, 715 aa, Staphylococcus aureus
MKKQIISLGALAVASSLFTWDNKADAIVTKDYSKESRVNENSKYGTLISDWYLKGRLTSLESQFINALDILETYHYGEKEYKDAKDKLMTRILGEDQYLLERKKVQYEEYKKLYQKYKEENPTSKGLKLKTFDQYTIEDLTMREYNELTESLKSAVKDFEKDVEKIENQHHDLKPFTDEMEEKATSRVDDLANKAYSVYFAFVRDTQHKTEALELKAKVDLVLGDEDKPHRISNERIEKEMIKDLESIIEDFFIETGLNKPGNITSYDSSKHHYKNHSEGFEALVKETREAVANADESWKTKTVKKYGESETKSPVVKEENKVEDPQSPKFDNQQEVKTTAGKAEETTQPVAQPLVKIPQGTITGEIVKGPEYPTMENKTLQGEIVQGPDFPTMEQSGPSLSDNYTQPTTPNPILEGLEGSSSKLEIKPQGTESTLKGIQGESSDIEVKPQATETTEASQYGPRPQFNKTPKYVKYRDAGTGIREYNDGTFGYEARPRFNKPSETNAYNVTTNQDGTVSYGARPTQNKASETNAYNVTTHANGQVSYGARPTQKKPSETNAYNVTTHANGQVSYGARPTYNKPSETNAYNVTTHGNGQVSYGARPTYKKPSKTNAYNVTTHANGQVSYGARPTQNKPSETNAYNVTTHANGQVSYGARPTQNKPSETNAYNVTTHGNGQVSYGARPTYNKPSKTNAYNVTTHADGTATYGPRVTK

SEQ ID NO: 87 - DNA, 2252 bp, Staphylococcus aureus
  CDS (698)..(2224)
gaattcacaattctagctattatcacttctcaaaataaaaacatcgttcttcttaaagatttaattgaaacaatccaccataaataccctcaaactgttagagctctcaataatttaaaaaagcaaggctatctaataaaagaacggctcaactgaagatgaaagaaaaattttaattcatatgaatgacgcgcagcaagaccatgctgaacaattattagctcaagtgaatcaattattggcagataaaaatcatttacatcttgtttttgaataatatctctattacgcaagtgtgctgtattctaaagtgccattgtgttttctattttttaataaaacctcagcacattatgaacaactttctattttctatatctcttaaaaccatttccgaaattaaacctcagcacattcaaaattccattttattcttaaaaatattttttaactcatatgtaataaaccgctttcattataaaaaatatctatatattttatctgtttttattaatcggaatagcgtgattttgcggttttaagccttttacttcctgaataaatctttggacaaaatttttattttataagttgtaaaacttacctttaaatttaattataaatatagattttagtattgcaatacataattcgttatattatgatgactttacaaatacatacagggggtattaatttgaaaaagaaaaacatttattcaattcgtaaactaggtgtaggtattgcatctgtaactttaggtacattacttatatctggtggcgtaacacctgctgcaaatgctgcgcaacacgatgaagctcaacaaaatgctttttatcaagtgttaaatatgcctaacttaaacgctgatcaacgtaatggttttatccaaagccttaaagatgatccaagccaaagtgctaacgttttaggtgaagctcaaaaacttaatgactctcaagctccaaaagctgatgcgcaacaaaataagttcaacaaagatcaacaaagcgccttctatgaaatcttgaacatgcctaacttaaacgaagagcaacgcaatggtttcattcaaagtcttaaagacgatccaagccaaagcactaacgttttaggtgaagctaaaaaattaaacgaatctcaagcaccgaaagctgacaacaatttcaacaaagaacaacaaaatgctttctatgaaatcttgaacatgcctaacttgaacgaagaacaacgcaatggtttcatccaaagcttaaaagatgacccaagtcaaagtgctaaccttttagcagaagctaaaaagttaaatgaatctcaagcaccgaaagctgataacaaattcaacaaagaacaacaaaatgctttctatgaaatcttacatttacctaacttaaatgaagaacaacgcaatggtttcatccaaagcttaaaagatgacccaagccaaagcgctaaccttttagcagaagctaaaaagctaaatgatgcacaagcaccaaaagctgacaacaaattcaacaaagaacaacaaaatgctttctatgaaattttacatttacctaacttaactgaagaacaacgtaacggcttcatccaaagccttaaagacgatccttcagtgagcaaagaaattttagcagaagctaaaaagctaaacgatgctcaagcaccaaaagaggaagacaacaacaagcctggtaaagaagacggcaacaaacctggtaaagaagacggcaacaaacctggtaaagaagacaacaaaaaacctggcaaagaagacggcaacaaacctggtaaagaagacaacaaaaaacctggcaaagaagatggcaacaaacctggtaaagaagacggcaacaagcctggtaaagaagatggcaacaagcctggtaaagaagatggcaacaagcctggtaaagaagacggcaacggagtacatgtcgttaaacctggtgatacagtaaatgacattgcaaaagcaaacggcactactgctgacaaaattgctgcagataacaaattagctgataaaaacatgatcaaacctggtcaagaacttgttgttgataagaagcaaccagcaaaccatgcagatgctaacaaagctcaagcattaccagaaactggtgaagaaaatccattcatcggtacaactgtatttggtggattatcattagcgttaggtgcagcgttattagctggacgtcgtcgcgaactataaaaacaaacaatacacaacgatagatatc

SEQ ID NO: 88 - protein, 508 aa, Staphylococcus aureus
LKKKNIYSIRKLGVGIASVTLGTLLISGGVTPAANAAQHDEAQQNAFYQVLNMPNLNADQRNGFIQSLKDDPSQSANVLGEAQKLNDSQAPKADAQQNKFNKDQQSAFYEILNMPNLNEEQRNGFIQSLKDDPSQSTNVLGEAKKLNESQAPKADNNFNKEQQNAFYEILNMPNLNEEQRNGFIQSLKDDPSQSANLLAEAKKLNESQAPKADNKFNKEQQNAFYEILHLPNLNEEQRNGFIQSLKDDPSQSANLLAEAKKLNDAQAPKADNKFNKEQQNAFYEILHLPNLTEEQRNGFIQSLKDDPSVSKEILAEAKKLNDAQAPKEEDNNKPGKEDGNKPGKEDGNKPGKEDNKKPGKEDGNKPGKEDNKKPGKEDGNKPGKEDGNKPGKEDGNKPGKEDGNKPGKEDGNGVHVVKPGDTVNDIAKANGTTADKIAADNKLADKNMIKPGQELVVDKKQPANHADANKAQALPETGEENPFIGTTVFGGLSLALGAALLAGRRREL

SEQ ID NO: 89 - DNA, 324 bp, Staphylococcus aureus
  CDS (1)..(306)
  CDS (310)..(315)
atgcggggttctcatcatcatcatcatcatggtatggctagcatgactggtggacagcaaatgggtcgggatctgtacgacgatgacgataaggatccgagctcgagaggatccaaagctgatgcgcaacaaaataacttcaacaaagatcaacaaagcgccttctatgaaatcttgaacatgcctaacttaaacgaagcgcaacgcaacggcttcattcaaagtcttaaagacgacccaagccaaagcactaacgttttaggtgaagctaaaaaattaaacgaatctcaagcagggaaactagtttagaaagcttgatccggc

SEQ ID NO: 90 - protein, 104 aa, Staphylococcus aureus
MRGSHHHHHHGMASMTGGQQMGRDLYDDDDKDPSSRGSKADAQQNNFNKDQQSAFYEILNMPNLNEAQRNGFIQSLKDDPSQSTNVLGEAKKLNESQAGKLVKA

SEQ ID NO: 91 - protein, 60 aa, Staphylococcus aureus
TADNKFNKEQQNAFYEILHLPNLNEEQRNGFIQSLKDDPSQSANLLAEAKKLNDAQAPKA

SEQ ID NO: 92 - DNA, 2593 bp, Homo sapiens
  CDS (56)..(508)
agttgtctttggtagttttttgcactaacttcaggaaccagctcatgatctcaggatgtatggaaaaataatctttgtattactattgtcagcaattgtgagcatatcagcatcaagtaccactggtgtggcaatgcacacttcaacctcttcttcagtcacaaagagttacatctcatcacagacaaatgatacgcacaaacgggacacatatgcagccactcctagagctcatgaagtttcagaaatttctgttagaactgtttaccctccagaagaggaaaccggagaaagggtacaacttgcccatcatttctctgaaccagagataacactcattatttttggggtgatggctggtgttattggaacgatcctcttaatttcttacggtattcgccgactgataaagaaaagcccatctgatgtaaaacctctcccctcacctgacacagacgtgcctttaagttctgttgaaatagaaaatccagagacaagtgatcaatgagaatctgttcaccaaaccaaatgtggaaagaacacaaagaagacataagacttcagtcaagtgaaaaattaacatgtggactggacactccaataaattatatacctgcctaagttgtacaatttcagaatgcaattttcattataatgagttccagtgactcaatgatggggaaaaaaatctctgctcattaatatttcaagataaagaacaaatgtttccttgaatgcttgcttttgtgtgttagcataatttttagaattgtttgagaattctgatccaaaactttagttgaattcatctacgtttgtttaatattaacttaacctattctattgtattataatgatgattctgtcaaatgaaaggcttgaaatacctagatgaagtttagattttcttcctattgtaaacttttgagtctggtttcattgttttaaataaattaaggggacactaaagtcctatcattcattccttcattctgaacaggcaagatataatattacatgaatgattactatattttgttcacactaataaagcttatgctcagaaatgccatacacacacacaaacacacacatttatcatttaatgcataaatcaacacaaaaggttttcccattaatatgaaatattacatatatataagtgccatatttaaaataatttgtctaacagtagaactatgtcggagcactcactgaagcttcgatttcccactgaaagagttatttgttgtaagtagagttatcccggagaaggaaaaagaacttacgacctttctttataacagaaagctcaactctaaattcaacaagatgtgcaaaccggacatgcaggtgaatattttaataggttactataaggttctcaattaaattctttaatctgtccagtcccagtttctcttattaataaaactttggaaattgctttaaaccatttaaaggaaatttctagatatagaaactaaaggactgtgactatacagtgtcactcatttgtagtaaaacttaaaaagcaaaaacaaaaaacaaaaaagaccttcctgtgatactttatttccgaactaataaaaatctatatgactttttattattgtgtgataaccaagtaaatgttttctattttcgatattttcaggcatggtaacagaaatttaccttttaataaattaaaaaatctaaattttaacctacttgtatgttcggagagtgtttttgtactatattgactacttaaaatagagaatgagactaagaagggaacatttctgttgatacatgttttttaaaagtaatttttaagagcattattaggttaatttaatccaattaatgacccaaatgccaaggtaattttaaatttacatttttaataaaagcaacatgttgaaacaagagagggtgagattaacctttttgctaaagtaatttacaagtcaaagacaggaagagatcagagtgaatgtgccttcttaaccagagctacagaatttagtgaataattaaagtacaaactgctttgacctccttgaacttttccaagcaatttctctgtacttctatatatgaatgtcttagccaattttctgctactataacagaatacgacagactgggtaatttaaaaagaaaagaaatttattttcttcctagttctggaggctgggaaggcgaagggcatggcactgacatctgccttgtaactgatgagaaccttcttactgcatgataacaaagcagcaaggcaagcaaaagcgtaagatgaagagagaggaaatgaagccaaacacatcctttcatcagaagcccattccctctataaggcgttactacatttatgagaatggagtcctcatgacctaatcgtgaccttaaaggcccctcccaacactgttacaatggcaattaaatttcaacaaaggttccagaggtgacattcgaatcagcaatgaaattttcatagttaaatttggtattcgtgggggaagaaatgaccatttcccttgtatttttataattaaatcagcaaaatattgtaataaagaaatctttcctgtgaagataccatgacccc

SEQ ID NO: 93 - protein, 150 aa, Homo sapiens
MYGKIIFVLLLSAIVSISASSTTGVAMHTSTSSSVTKSYISSQTNDTHKRDTYAATPRAHEVSEISVRTVYPPEEETGERVQLAHHFSEPEITLIIFGVMAGVIGTILLISYGIRRLIKKSPSDVKPLPSPDTDVPLSSVEIENPETSDQ

SEQ ID NO: 94 - DNA, 5185 bp, Homo sapiens
  CDS (104)..(4474)
gggaacttggattaggtggagaggcagttggggggcctcgttgttttgcgtcttagttccgccctcctgtccatcaggagaaggaaaggataaaccctgggccatgaggctacccctgctcctggtttttgcctctgtcattccgggtgctgttctcctactggacaccaggcaatttttaatctataatgaagatcacaagcgctgcgtggatgcagtgagtcccagtgccgtccaaaccgcagcttgcaaccaggatgccgaatcacagaaattccgatgggtgtccgaatctcagattatgagtgttgcatttaaattatgcctgggagtgccatcaaaaacagactgggttgctatcactctctatgcctgtgactcaaaaagtgaatttcagaaatgggagtgcaaaaatgacacacttttggggatcaaaggagaagatttattttttaactacggcaacagacaagaaaagaatattatgctctacaagggatcgggtttatggagcaggtggaagatctatggaaccacagacaatctgtgctccagaggttatgaagccatgtatacgctactaggcaatgccaatggagcaacctgtgcattcccgttcaagtttgaaaacaagtggtacgcagattgcacgagtgctgggcggtcggatggatggctctggtgcggaaccactactgactatgacacagacaagctatttggatattgtccattgaaatttgagggcagtgaaagcttatggaataaagacccgctgaccagcgtttcctaccagataaactccaaatccgctttaacgtggcaccaagcgaggaaaagctgccaacaacagaacgctgagctcctgagcatcacagagatacatgagcaaacatacctgacaggattaaccagttccttgacctcaggactctggattggacttaacagtctgagcttcaacagcggttggcagtggagtgaccgcagtcctttccgatatttgaactggttaccaggaagtccatcagctgaacctggaaaaagctgtgtgtcactaaatcctggaaaaaatgctaaatgggaaaatctggaatgtgttcagaaactgggctatatttgcaaaaagggcaacaccactttaaattcttttgttattccctcagaaagtgatgtgcctactcactgtcctagtcagtggtggccgtatgccggtcactgttacaagattcacagagatgagaaaaaaatccagagggatgctctgaccacctgcaggaaggaaggcggtgacctcacaagtatccacaccatcgaggaattggactttattatctcccagctaggatatgagccaaatgacgaattgtggatcggcttaaatgacattaagattcaaatgtactttgagtggagtgatgggacccctgtaacgtttaccaaatggcttcgtggagaaccaagccatgaaaacaacagacaggaggattgtgtggtgatgaaaggcaaggatgggtactgggcagatcggggctgtgagtggcctcttggctacatctgcaagatgaaatcacgaagccaaggtccagaaatagtggaagtcgaaaaaggctgcaggaaaggctggaaaaaacatcacttttactgctatatgattggacatacgctttcaacatttgcagaagcaaaccaaacctgtaataatgagaatgcttatttaacaactattgaagacagatatgaacaagccttcctgactagtttcgttggcttaaggcctgaaaaatatttctggacaggactttcagatatacaaaccaaagggacttttcagtggaccatcgaggaagaggttcggttcacccactggaattcagatatgccagggcgaaagccagggtgtgttgccatgagaaccgggattgcagggggcttatgggatgttttgaaatgtgatgaaaaggcaaaatttgtgtgcaagcactgggcagaaggagtaacccacccaccgaagcccacgacgactcccgaacccaaatgtccggaggattggggcgccagcagtagaacaagcttgtgtttcaagctgtatgcaaaaggaaaacatgagaagaaaacgtggtttgaatctcgagatttttgtcgagctctgggtggagacttagctagcatcaataacaaagaggaacagcaaacaatatggcgattaataacagctagtggaagctaccacaaactgttttggttgggattgacatatggaagcccttcagaaggttttacttggagtgatggttctcctgtttcatatgaaaactgggcttatggagaacctaataattatcaaaatgttgaatactgtggtgagctgaaaggtgaccctactatgtcttggaatgatattaattgtgaacaccttaacaactggatttgccagatacaaaaaggacaaacaccaaaacctgagccaacaccagctcctcaagacaatccaccagttactgaagatgggtgggttatttacaaagactaccagtattatttcagcaaagagaaggaaaccatggacaatgcgcgagcgttttgcaagaggaattttggtgatcttgtttctattcaaagtgaaagtgaaaagaagtttctatggaaatatgtaaacagaaatgatgcacagtctgcatattttattggtttattgatcagcttggataaaaagtttgcttggatggatggaagcaaagtggattacgtgtcttgggccacaggtgaacccaattttgcaaatgaagatgaaaactgtgtgaccatgtattcaaattcagggttttggaatgacattaactgtggctatccaaacgccttcatttgccagcgacataacagtagtatcaatgctaccacagttatgcctaccatgccctcggtcccatcagggtgcaaggaaggttggaatttctacagcaacaagtgtttcaaaatctttggatttatggaagaagaaagaaaaaattggcaagaggcacgaaaagcttgtataggctttggagggaatctggtctccatacaaaatgaaaaagagcaagcatttcttacctatcacatgaaggactccactttcagtgcctggactgggctgaatgatgtcaattcagaacacacgttcctttggacggatggacgaggagtccattacacaaactgggggaaaggttaccctggtggaagaagaagcagtctttcttatgaagatgctgactgtgttgttattattggaggtgcatcaaatgaagcaggaaaatggatggatgatacctgcgacagtaaacgaggctacatatgccagacacgatccgacccttccttgactaatcctccagcaacgattcaaacagatggctttgttaaatatggcaaaagcagctattcactcatgagacaaaaatttcaatggcatgaagcggagacatactgcaagcttcacaattcccttatagccagcattctggatccctacagtaatgcatttgcgtggctgcagatggaaacatctaatgaacgtgtgtggatcgccctgaacagtaacttgactgataatcaatacacttggactgataagtggagggtgaggtacactaactgggctgctgatgagcccaaattgaaatcagcatgtgtttatctggatcttgatggctactggaagacagcacattgcaatgaaagtttttactttctctgtaaaagatcagatgaaatccctgctactgaacccccacaactgcctggcagatgcccggagtcagatcacacagcatggattcctttccatggtcactgttactatattgagtcctcatatacaagaaactggggccaagcttctctggaatgtcttcgaatgggttcctctctggtttccattgaaagtgctgcagaatccagttttctgtcatatcgggttgagccacttaaaagtaaaaccaatttttggataggattgttcagaaatgttgaagggacgtggctgtggataaataacagtccggtctcctttgtcaactggaacacaggagatccctctggtgaacggaatgattgtgtagctttacatgcgtcttctgggttttggagtaatattcactgttcttcctacaaaggatatatttgtaaaagaccaaaaattattgatgctaaacctactcatgaattacttacaacaaaagctgacacaaggaagatggacccttctaaaccgtcttccaacgtggccggagtagtcatcattgtgatcctcctgattttaacgggtgctggccttgccgcctatttcttttataagaaaagacgtgtgcacctacctcaagagggcgcctttgaaaacactctgtattttaacagtcagtcaagcccaggaactagtgatatgaaagatctcgtgggcaatattgaacagaatgaacactcggtcatctagtacctcaatgcgattctgagatatttgaatttcataaaattgtaactgaaatttaaaatttttagttcaatgtgattgttttctttaaaatgagtactgaattgtactggtctgtccttttttcctttgcctaattgaagaaataattgcttgttttctagcctggcaagatattttcataaaagagggataacaatgctgattactaccttttaaaatattttagataaatgcacagcaccacagcaccacatctaagcattagtgatgggtagctgatgtcagcttcatgtggattttaagcactctagaaacaatgaagcttcttggcatattttaaggagctcccaaaatgtgttacctattaaattgtaactcagcaagtagaagaccatttgaaaagtcaggtacaaatttcctcaagtggcataaaaatgtagtcagttttctcttttaccagtttttatttccactccaattatttagaactttatttgtacatgtgcagaagaataaggcagctgagaatcttgtttcccccaagagagttttacaggctgagtgttgcaaatgtgttctttgtcctgttatatgtatatcaggaatacaaggatgtgaaataaaactgtaaatttgcataactggatgtacttagataatgtgaaataaacattaaagacaaggtctatttttaataaaaaaaaaaaaaaa

SEQ ID NO: 95 - protein, 1456 aa, Homo sapiens [sequence omitted]

SEQ ID NO: 96 - DNA, 780 bp, Homo sapiens
gtgtatctctcagagtgcaagactgggaatggaaagaattacagagggacgatgtccaaaacaaaaaatggcatcacctgtcaaaaatggagttccacttctccccacagacctagattctcacctgctacacacccctcagagggactggaggagaactactgcaggaatccagacaacgatccgcaggggccctggtgctatactactgatccagaaaagagatatgactactgcgacattcttgagtgtgaagaggaatgtatgcattgcagtggagaaaactatgacggcaaaatttccaagaccatgtctggactggaatgccaggcctgggactctcagagcccacacgctcatggatacattccttccaaatttccaaacaagaacctgaagaagaattactgtcgtaaccccgatagggagctgcggccttggtgtttcaccaccgaccccaacaagcgctgggaactttgtgacatcccccgctgcacaacacctccaccatcttctggtcccacctaccagtgtctgaagggaacaggtgaaaactatcgcgggaatgtggctgttaccgtgtccgggcacacctgtcagcactggagtgcacagacccctcacacacatgaaaggacaccagaaaacttcccctgcaaaaatttggatgaaaactactgccgcaatcctgacggaaaaagggccccatggtgccatacaaccaacagccaagtgcggtgggagtactgtaagataccgtcctgtgactcctccccagta

SEQ ID NO: 97 - DNA, 1449 bp, Homo sapiens
  CDS (1)..(1449)
atggcgtctttctctgctgagaccaattcaactgacctactctcacagccatggaatgagcccccagtaattctctccatggtcattctcagccttacttttttactgggattgccaggcaatgggctggtgctgtgggtggctggcctgaagatgcagcggacagtgaacacaatttggttcctccacctcaccttggcggacctcctctgctgcctctccttgcccttctcgctggctcacttggctctccagggacagtggccctacggcaggttcctatgcaagctcatcccctccatcattgtcctcaacatgtttgccagtgtcttcctgcttactgccattagcctggatcgctgtcttgtggtattcaagccaatctggtgtcagaatcatcgcaatgtagggatggcctgctctatctgtggatgtatctgggtggtggcttttgtgatgtgcattcctgtgttcgtgtaccgggaaatcttcactacagacaaccataatagatgtggctacaaatttggtctctccagctcattagattatccagacttttatggagatccactagaaaacaggtctcttgaaaacattgttcagccgcctggagaaatgaatgataggttagatccttcctctttccaaacaaatgatcatccttggacagtccccactgtcttccaacctcaaacatttcaaagaccttctgcagattcactccctaggggttctgctaggttaacaagtcaaaatctgtattctaatgtatttaaacctgctgatgtggtctcacctaaaatccccagtgggtttcctattgaagatcacgaaaccagcccactggataactctgatgcttttctctctactcatttaaagctgttccctagcgcttctagcaattccttctacgagtctgagctaccacaaggtttccaggattattacaatttaggccaattcacagatgacgatcaagtgccaacacccctcgtggcaataacgatcactaggctagtggtgggtttcctgctgccctctgttatcatgatagcctgttacagcttcattgtcttccgaatgcaaaggggccgcttcgccaagtctcagagcaaaacctttcgagtggccgtggtggtggtggctgtctttcttgtctgctggactccataccacatttttggagtcctgtcattgcttactgacccagaaactcccttggggaaaactctgatgtcctgggatcatgtatgcattgctctagcatctgccaatagttgctttaatcccttcctttatgccctcttggggaaagattttaggaagaaagcaaggcagtccattcagggaattctggaggcagccttcagtgaggagctcacacgttccacccactgtccctcaaacaatgtcatttcagaaagaaatagtacaactgtgtga

SEQ ID NO: 98 - protein, 482 aa, Homo sapiens
MASFSAETNSTDLLSQPWNEPPVILSMVILSLTFLLGLPGNGLVLWVAGLKMQRTVNTIWFLHLTLADLLCCLSLPFSLAHLALQGQWPYGRFLCKLIPSIIVLNMFASVFLLTAISLDRCLVVFKPIWCQNHRNVGMACSICGCIWVVAFVMCIPVFVYREIFTTDNHNRCGYKFGLSSSLDYPDFYGDPLENRSLENIVQPPGEMNDRLDPSSFQTNDHPWTVPTVFQPQTFQRPSADSLPRGSARLTSQNLYSNVFKPADVVSPKIPSGFPIEDHETSPLDNSDAFLSTHLKLFPSASSNSFYESELPQGFQDYYNLGQFTDDDQVPTPLVAITITRLVVGFLLPSVIMIACYSFIVFRMQRGRFAKSQSKTFRVAVVVVAVFLVCWTPYHIFGVLSLLTDPETPLGKTLMSWDHVCIALASANSCFNPFLYALLGKDFRKKARQSIQGILEAAFSEELTRSTHCPSNNVISERNSTTV

SEQ ID NO: 99 - DNA, 852 bp, Homo sapiens
  CDS (59)..(463)
cttgcagctgcccacctcaccctcagctctggcctcttactcaccctctaccacagacatggctcagtcactggctctgagcctccttatcctggttctggcctttggcatccccaggacccaaggcagtgatggaggggctcaggactgttgcctcaagtacagccaaaggaagattcccgccaaggttgtccgcagctaccggaagcaggaaccaagcttaggctgctccatcccagctatcctgttcttgccccgcaagcgctctcaggcagagctatgtgcagacccaaaggagctctgggtgcagcagctgatgcagcatctggacaagacaccatccccacagaaaccagcccagggctgcaggaaggacaggggggcctccaagactggcaagaaaggaaagggctccaaaggctgcaagaggactgagcggtcacagacccctaaagggccatagcccagtgagcagcctggagccctggagaccccaccagcctcaccaacgcttgaagcctgaacccaagatgcaagaaggaggctatgctcaggggccctggagcagccaccccatgctggccttgccacactctttctcctgctttaaccaccccatctgcattcccagctctaccctgcatggctgagctgcccacagcaggccaggtccagagagaccgaggagggagagtctcccagggagcatgagaggaggcagcaggactgtccccttgaaggagaatcatcaggaccctggacctgatacggctccccagtacaccccacctcttccttgtaaatatgatttatacctaactgaataaaaagctgttctgtcttcccacccgc

SEQ ID NO: 100 - protein, 134 aa, Homo sapiens
MAQSLALSLLILVLAFGIPRTQGSDGGAQDCCLKYSQRKIPAKVVRSYRKQEPSLGCSIPAILFLPRKRSQAELCADPKELWVQQLMQHLDKTPSPQKPAQGCRKDRGASKTGKKGKGSKGCKRTERSQTPKGP

SEQ ID NO: 101 - DNA, 6788 bp, Homo sapiens
gctttcctctcctttctccctcccccttgtctgcgccacagcccccttctctccccgccccccgggtgtgtcagatttttcagttaataatatcccccgagcttcaaagcgcaggctgtgacagtcatctgtctggacgcgctgggtggatgcggggggctcctgggaactgtgttggagccgagcaagcgctagccaggcgcaagcgcgcacagactgtagccatccgaggacacccccgcccccccggcccacccggagacacccgcgcagaatcgcctccggatcccctgcagtcggcgggaggtaaggagcagggcttgcaaaccgcccggcgcccagggaagcgacgagcgccggggcaaggcaagccctggacgggattgcgacgtgcgcaccgggcgccctaatatgcccgggggactgtttctgcttccgaaacaaaaccatctctgggttttcccagaaaagccagttccagccccgaaggcatcctggctagaggagacccgccctaatccttttgcagcccttaccggggggagtaatggcttctgcgaaaagaaattccctcggctctagaagatctgtctgtgtttgagctgtcggagagccggtgcgtccccaccccaggctggggttcttctccaaagggtgcccctggaggaagaagagggggggattaggcagggcgaggccgccgcggtcgcaatctgggtcacggctgctccagcttggaggagaggcggctctcccggcgacctcctcgcgcgcggcgcccctgccattcccgggaacaggggctcagcctctccctccctggaagaggacgttgtcgtggtttggaagagcaggggtgggcttagagcttccaattaagctattggcaggagtatccctgcagcgggtgaatgccgaggggcgtttgcccaaatttggggaggggaaggatttgtggatatgggtgtctgttgttggtctctgtctagagaaaggcttttttttatttgcaaagttttctaaatcccctgctatcatttgcactcctgaggttgcatttttacaaagggggtagaaggtactccaaataccattcccggtagctgggtcggagagcctggggcttcccctgagcagccggccccacaccgctgcgagtgcggttgtctgcgtgctcgtgagagctagaattctgcagccaggaacagccccctcccccaggcagtgccttgtgtgaatgaaatggcagtttccaaagttgcggacgcctcgccaccaccccctgcatctgcatgccccctcccaccccctgtcgtagacagcttgtacacaaaaggagggcgggagggagggagcgagaggcacaacttcctccaccttcgggagcagtgggcagagtggggggcttggagggaagattggggaacctggttagagggggcgcccattgcctatcccctcggtctgccccgtttgcccaccctctccggtgtgtctgtcggttgcagtgttggaggtcggcgccggcccccgccttccgcgccccccacgggaaggaagcacccccggtattaaaacgaacggggcggaaagaagccctcagtcgccggccgggaggcgagccgatgccgagctgctccacgtccaccatgccgggcatgatctgcaagaacccagacctcgagtttgactcgctacagccctgcttctacccggacgaagatgacttctacttcggcggccccgactcgacccccccgggggaggacatctggaagaagtttgagctgctgcccacgcccccgctgtcgcccagccgtggcttcgcggagcacagctccgagcccccgagctgggtcacggagatgctgcttgagaacgagctgtggggcagcccggccgaggaggacgcgttcggcctggggggactgggtggcctcacccccaacccggtcatcctccaggactgcatgtggagcggcttctccgcccgcgagaagctggagcgcgccgtgagcgagaagctgcagcacggccgcgggccgccaaccgccggttccaccgcccagtccccgggagccggcgccgccagccctgcgggtcgcgggcacggcggggctgcgggagccggccgcgccggggccgccctgcccgccgagctcgcccacccggccgccgagtgcgtggatcccgccgtggtcttcccctttcccgtgaacaagcgcgagccagcgcccgtgcccgcagccccggccagtgccccggcggcgggccctgcggtcgcctcgggggcgggtattgccgccccagccggggccccgggggtcgcccctccgcgcccaggcggccgccagaccagcggcggcgaccacaaggccctcagtacctccggagaggacaccctgagcgattcaggtaaagaccgaactcgggtccggctgcctccctggggcactggaccccgggtcgcgtcccctttgttagtgctcgtatgtcttggcctggggagcattttggaggcagtgctaggggcagagaggtcctgtttcccccaagtctctcctcggggtaaagagaaggggctgagagaatgccgttgcaaaaggggtgctctccaattctcgccttcactaaagttccttccaccctctcctggggagccctcctctaggccatcacgggccctcacccggtcccccacctctcttttgcaggcagtctgaggaataaaattggagaagttggtggctaaaccgggtgggggtttagggggttgctgggtgcactgcctggacagaaacctgattgcgcaggggtgaaagggactctctggcccaggtcaggggagggaaagacatcccgagaagattcaagggctgtgcaaagccctgtttaaggcgcaggaacttataggagggttgcacagatggctagagccgattttctattctttttctttttctttttttttttttttcaaatgtcggtacctttcccttcccccatcctcggtgggtggtgggctatttgctcctgttcgtggccagcaggcggcgatatgcgaggccagcaggcgggcccgggatctgaaaggctgggggtggtgggggcaccctccctccctccattcagcagctggctgcaagtgcaacagcagttgtgtacattctcagggggcctcctctttccagtgtgcagtggaaactggctgtagttttgtcttccagcctgaattccaggcctaatttgagatgtgagttgtatctaacccagtgcccttgaaggtgagggcaggcactcagcagcctctccaggaaggctcacatcctgggaggactcactgattagttctattgtgttcatttgtctgtgtcttaagctgaagggaagagttaaaaccaagcctttccctgggggtctggatgaacagaactcaacccaaagagtggcattgccttgtccttggagcagggagctgggaccccccttggactttgaaaacagtgttttcagaatgcaggtggataacaagcctaaatttacttctgggctgaggagagatctttgaggctcctggaaggaaacttggtgataagcctccagtttgaaacggctctgtccctttaatgtctgtgccttgacagcttttggtgaggaagcacttccttccaacagctgtcttcttggcagaaaaccaaaacattggcttaaagggacccacagactggaacagcctcacatttcggctttagaacaaatcccacaattgttcagctttccggtccccttcagatcaagcagaagatatgttttgattttcatgcttgtattttaaacaataattttctaccccagcgtggtagtcaatgaggagagaggggaagaatgcgcacatgatgctacacgtttctgttgttgctgttattattggtggctttgaggagagctgctcccatttggggtttataccaactgtggattatggctttgtcattaagatttgatctttgttaaatgaaaaactgtttattgtataaaactcaggtttgtggacgaaaagttgttttttttcttcagttaattaaattgttcctcaagtttgtttaaggacttaaaatcaaacacaaccatgtgtaaactgctaaatgaggctcctaaaatgagaggcctcaactctttaagtgtggagctagaaatgtaaataagtccacagggcagactggtgattatgataaaagctaccatttactgagcatctgtctactaggctcagctctatgctaagtctacatgttatctgtcaaagtggtatcatccccatttaatagctgaggaaacagaggcttagaaaggctgggtaacttgaccagggtcatgcaactagtctgcggtggagccaggattctgtctgaccctaaaggccaaggttctttatatttatttctaccacctgctaaagtcttgaatggaggctgaaagcacagttggggtatggggaaagaaaatatatatacatacatatatgtatatgtatgtatgtatgtatggggggttgttttgtttttgtttttgataaggagttttgctcttgttgcccaggctggagtgcagtggtatgatctgggctcactgcaacctccgccacccgggttcaagtcattctcctgcctcagcctcccgagtagctgggattaccggagcatgccaccacacccagcaaagttttgtatttttagtagagacagggtttcaccatgttggccaggctgatcttgaactcctcatctcaggtgatctgccgcctccgcttcccaaagtgctgggattacaggtgtgagtcaccgcgtccggcctacagatatatttaatttaaagatctaaaacaaatacaaaactgtccacatctatgttgatggacccataaaaatagcagtctgccagggtctgccggaagagacagataagcatacatattaacatggatatatatgtgaatttcattcaaatggttctcacatgagagtaactagcatctttctctcagatgatgaagatgatgaagaggaagatgaagaggaagaaatcgacgtggtcactgtggagaagcggcgttcctcctccaacaccaaggctgtcaccacattcaccatcactgtgcgtcccaagaacgcagccctgggtcccgggagggctcagtccagcgagctgatcctcaaacgatgccttcccatccaccagcagcacaactatgccgccccctctccctacgtggagagtgaggatgcacccccacagaagaagataaagagcgaggcgtccccacgtccgctcaagagtgtcatccccccaaaggctaagagcttgagcccccgaaactctgactcggaggacagtgagcgtcgcagaaaccacaacatcctggagcgccagcgccgcaacgaccttcggtccagctttctcacgctcagggaccacgtgccggagttggtaaagaatgagaaggccgccaaggtggtcattttgaaaaaggccactgagtatgtccactccctccaggccgaggagcaccagcttttgctggaaaaggaaaaattgcaggcaagacagcagcagttgctaaagaaaattgaacacgctcggacttgctagacgcttctcaaaactggacagtcactgccactttgcacattttgattttttttttaaacaaacattgtgttgacattaagaatgttggtttactttcaaatcggtcccctgtcgagttcggctctgggtgggcagtaggaccaccagtgtggggttctgctgggaccttggagagcctgcatcccaggatgctgggtgccctgcagcctcctccacctcacctccatgacagcgctaaacgttggtgacggttgggagcctctggggctgttgaagtcaccttgtgtgttccaagtttccaaacaacagaaagtcattccttctttttaaaatggtgcttaagttccagcagatgccacataaggggtttgccatttgatacccctggggaacatttctgtaaataccattgacacatccgccttttgtatacatcctgggtaatgagaggtggcttttgcggccagtattagactggaagttcatacctaagtactgtaataatacctcaatgtttgaggagcatgttttgtatacaaatatattgttaatctctgttatgtactgtactaattcttacactgcctgtatactttagtatgacgctgatacataactaaatttgatacttatattttcgtatgaaaatgagttgtgaaagttttgagtagatattactttatcactttttgaactaagaaacttttgtaaagaaatttactatatatatatgcctttttcctagcctgtttcttcctgttcatgtatttgttcatgtttggtgcatagaactgggtaaatgcaaagttctgtgtttaatttcttcaaaatgtatatatttagtgctgcatcttatagcactttgaaatacctcatgtttatgaaaataaatagcttaaaattaaatgatgcaactcaaccttttccttaatggcattacactctgcccttaaggagcaaccataaataatccataacctatagagggaatttggtttccgtaaatagccctttttgcacctgtacaatcctggttggggggcatgagtcatgtccccacttaaggtggagggaactgagtttggggaaattaaggcagttctccaagattatgcagaatagagatgttattagcgact

SEQ ID NO: 102 - DNA, 6107 bp, Staphylococcus aureus
  CDS (2507)..(3778)
  CDS (3813)..(4529)
agatctatcaaggatgtgatgttatgaaagtccaaatttatcaattaccgattgtttttggagatagttctaaaaatgaaactcaaataacgcaatggttcgaaaaaaatatgaatgctgaagtagatgtagtcgttttacctgaaatgtggaataatggctatgatttagagcatttaaatgaaaaagcagataataatctaggacaaagtttttcatttattaaacatttagctgaaaaatataaagtcgatatcgtagctgggtctgtttctaacattagaaacaatcaaatatttaatacagcttttagtgtgaataaaagtggccagctgattaatgaatacgacaaagttcatttagttcctatgttaagagagcatgaatttttaaccgctggcgaatacgtagctgaaccctttcaattgtctgacggtacttatgtgacccaacttatctgttatgatttacgttttccagaattattaagatatcctgctcgtagtggtgctaaaattgcattttatgtggcgcaatggcctatgtcacgtcttcaacattggcattcattactaaaggcacgtgcaattgaaaataatatgtttgtcattggaactaatagcactggattcgatggtaacacagaatatgctggtcattcgatagttataaacccaaatggagatttagttggagaattaaatgaatccgcagatattttgactgtagatttaaacttaaatgaagtagaacagcaacgcgaaaatatacctgtatttaaaagtattaaattagatttgtataaataagaagcgcccgaaataatatttaacacatgtcatgactaaacatagatttatgagagatttttcataagtctatgtttatttttttataatagataactcagtaagaacccatttcgccctttgcaaatgaatgattttcttaattaaattgattaattttttgaccttttccaacattagacttattcatatattttaacggcgggtctcataatgatgattaactcatcccttcttcattacaaaaaaggccgcgagcttgggaggggctcacgaccatacttattattaagggaatgttttacagttattttttcaatctatttttggggatgttattaattatgaaaaaaattttatttatcaaataatgataaatcgatgttgtttacgatagcttacatgctagaaataattatctgtaatgataattaagaaaaatacatagcactgagtccaaggaaactaactctactagcaaatgttactcacttgctaattttacatggttattaagttgggatggcttaataactcatacttttagtactatacgaagataacaaatttacaatgaaagtaattaattattcatcttattttttagtgaatttgttcactgtgtcgataatccattttactaagtcaccgattgttgaaatgatatcttgtgccattgaaatcactccttccttaattaagataaaaattcttaaaattaaacaactcatcaactattttccatcacatctctgtgatctagttatattaaaacatgctaaaagcatttattttccaatttttcttaactagtcgttttttattcttaactgtaaatttttttatgttaaaatattaaatacaaattacatttaacagttaagtatttatttcctacagttaggcaatataatgataaaagattgtactaaatcgtataatgacagtgaggagagtggtgtaaaattgaattattttgataataaaattgaccagtttgccacgtatcttcaaaagagaaataacttagatcatattcaatttttgcaagtacgattagggatgcaggtcttagctaaaaatataggtaaattaattgttatgtatactattgcctatattttaaacatttttctgtttacgttaattacgaatttaacattttatttaataagaagacatgcacatggtgcacatgcaccttcttctttttggtgttatgtagaaagtattatactatttatacttttacctttagtaatagtaaattttcatattaactttttaattatgattattttaacagttatttctttaggtgtaatctcagtatatgctcctgcagcaactaaaaagaagcccattcctgtgcgacttattaaacgaaaaaaatattatgcgattattgttagtttaacccttttcattatcacacttatcatcaaagagccatttgcccaattcattcaattaggcatcataatagaagctattacattattacctattttctttattaaggaggacttaaaatgaatacattatttaacttattttttgattttattactgggattttaaaaaacattggtaacatcgcagcttatagtacttgtgacttcataatggatgaagttgaagtaccaaaagaattaacacaattacacgaataatttaaatagagagtgtgatagtaggtggaattattaaatagttataattttgttttattcgtattaactcaaatgatattaatgtttacaataccagctataattagtggtattaagtacagtaaacttgattattttttcatcatagtaatttcgacattatcgttatttctatttaaaatgtttgatagcgcgtccttaatcatattaacttcatttattattataatgtattttgtcaaaatcaaatggtattctattttgttgattatgacttcgcagattattctatactgtgctaactacatgtatatagttatatatgcatatatcaccaaaatttctgatagtatatttgtaatattccctagcttttttgtagtttatgtgactattagtatactattctcatatataataaatagagttctcaaaaaaattagcacaccatatctaatactaaacaaaggatttttaatagttatttcgactatcttactgcttactttttcattatttttcttttattcacaaataaactcggatgaagctaaagtaataaggcagtattctttattttattggtatcactatattttaagtatattaacattgtattctcaatttctccttaaagagatgaaatataaacgtaatcaagaagaaattgaaacctattatgaatatacattgaagattgaagctatcaacaacgaaatgcgcaagttccgtcatgattatgtcaatatcttaacgacactttcagaatacattcgagaagatgacatgcctggcctacgtgattatttcaataaaaatattgtacctatgaaagacaatttacaaatgaatgctataaaattaaatggtatcgagaatcttaaagtacgtgaaattaaaggcttaattactgcgaaaattttacgtgcacaagaaatgaatattccgattagtatcgaaatacccgatgaagtaagtagcattaacttgaatatgatcgatttaagtcgcagtattggtattattcttgataatgcaattgaggcatcaactgaaattgatgaccctatcattcgcgttgcatttattgaaagtgaaaattcagtaacgtttattgttatgaataaatgcgctgatgatataccacgcattcatgaattgttccaagaaagtttttctactaaaggtgaaggtcgtggtttaggtctatcaactttaaaagaaattgctgataatgcagacaatgtcttattagatacaattatcgaaaatggtttcttttattcaaaaagttgaaattattaacaactagccataaggatgtgaatgtatgaaaattttcatttgcgaagacgatccaaaacaaagagaaaacatggttaccattattaaaaattatataatgatagaagaaaagcctatggaaattgccctcgcaactgataatccttatgaggtgcttgagcaagctaaaaatatgaatgacataggctgttactttttagatattcaactttcaactgatattaatggtatcaaattaggcagtgaaattcgtaagcatgacccagttggtaacattattttcgttacgagtcacagtgaacttacctatttaacatttgtctacaaagttgcagcgatggattttatttttaaagatgatccagctgaattaagaactcgaattatagactgtttagaaactgcacatacacgcttacaattgttgtctaaagataatagcgttgaaacgattgaattaaaacgtggcagtaattcagtgtatgttcaatatgatgatattatgttttttgaatcatcaacaaaatctcacagactcattgcccatttagataaccgtcaaattgaattttatggtaatttaaaagaactgagtcaattagatgatcgtttctttagatgtcataatagctttgtcgtcaatcgccataatattgaatctatagattcgaaagagcgaattgtctattttaaaaataaagaacactgctatgcatcggtgagaaacgttaaaaaaatataataagataataaagtcagttaacgacgtattcaattgtaaatcttgttggattttaacaagataactagcaaatgcactgtatagctggctttttaattttattaacaaaattaaatatgacgcgtgaattaaaaaatgatgtaacgtctctttgtatacctattcctattactacataatttatcaatttctatttcactctacaatcctatggcgcaatttttaacaaaatatactaaatttgaaattgacagtttccataaataaaatgctataatttcctactccgtgaatcttattttgtttaaaaaaacagtgtagcacaagattcaacttgtttcctacactgttttataaatgaattatttaaaatgcttgttcaacctcttgtaatgttggcaaactattaatagcaccatacttcgttgtcactattgcagcaacgcgattgctaaacgctaaaatttcctcaccttcattttcaaataactgagttaaatttaacacatcggttgctaaaatcctgctaataactgcaccaataaatgcatcccctgccccagttgtatcaacaggttttaccttatagccactatgataatgattaataccatttttcaaatatacggcagcaccatctgctcccttcgtataaatgactacagtaacattacctgtaaataatgattgaatggcttcattttcatcatgaatacctgtaataaattctaattcttcatctgaaacttttacaatatgcgccaatggcaaaaaggtatgaatagtttgtcttaaatcttcagcgttatcccataatggcaatcttacattaggatcaaatacgacagtaccatttgcatttaatgttttggtaatcaattgataatgtgcatctctcatcggactatcgaccaaatcaacagaacaaaaatgtactacatcattttcattcacatcaatatcattcacaaaacttggttcaaataacatatcagcagagggcttacgataaaaagaaaaatctcgctcgcccgcttcagtcaaactcacaaaagctaacgcagtgtttgcttcattcgtgcgatacacttttgatacatctacaccaatacttgatatcgtttcaataatgctatctccaaatgcatcattacctaattgtgtaatcatatacgcttgttgtcctaacttttgaactgtacaagctacattgcatggcgcgccaccaatttgcttcgtaaatgtttgaacatcttttaaattcgcatttgtaacatttggaataaaatcaattaacgcttctcctattgaaaatagacgtctcatttatgttcatcctttaaatcatatttagtaaattgtaaatatacttgccctgattctgttgatgttttaatacctagtgcgtcttctgtcgggaaaattcgagatgtcaaaacacgttctccatcattacagaaaatttctatactagatgtatcaacaaaaatttgtaattgctttaatggcgtgtctaatatcgtactacgcgtcgtaccttcaacatttgtcggcaataaaccactgtcgctgcgatcc

SEQ ID NO: 103 - protein, 423 aa, Staphylococcus aureus
VELLNSYNFVLFVLTQMILMFTIPAIISGIKYSKLDYFFIIVISTLSLFLFKMFDSASLIILTSFIIIMYFVKIKWYSILLIMTSQIILYCANYMYIVIYAYITKISDSIFVIFPSFFVVYVTISILFSYIINRVLKKISTPYLILNKGFLIVISTILLLTFSLFFFYSQINSDEAKVIRQYSLFYWYHYILSILTLYSQFLLKEMKYKRNQEEIETYYEYTLKIEAINNEMRKFRHDYVNILTTLSEYIREDDMPGLRDYFNKNIVPMKDNLQMNAIKLNGIENLKVREIKGLITAKILRAQEMNIPISIEIPDEVSSINLNMIDLSRSIGIILDNAIEASTEIDDPIIRVAFIESENSVTFIVMNKCADDIPRIHELFQESFSTKGEGRGLGLSTLKEIADNADNVLLDTIIENGFFYSKS

SEQ ID NO: 104 - protein, 238 aa, Staphylococcus aureus
MKIFICEDDPKQRENMVTIIKNYIMIEEKPMEIALATDNPYEVLEQAKNMNDIGCYFLDIQLSTDINGIKLGSEIRKHDPVGNIIFVTSHSELTYLTFVYKVAAMDFIFKDDPAELRTRIIDCLETAHTRLQLLSKDNSVETIELKRGSNSVYVQYDDIMFFESSTKSHRLIAHLDNRQIEFYGNLKELSQLDDRFFRCHNSFVVNRHNIESIDSKERIVYFKNKEHCYASVRNVKKI

SEQ ID NO: 105 - DNA, 7499 bp, Escherichia coli
  CDS (444)..(1475)
  CDS (1478)..(2590)
  CDS (2592)..(3386)
  CDS (3426)..(4361)
  CDS (4375)..(5481)
  CDS (5484)..(6503)
  CDS (6543)..(7487)
atagtaaatagctgacttatggatgtgctggggattctatgtatttagctgtggctttaccattacttttcccgtttttgacttaaatagcttcagtttggtctgatctgccgctacatcttcattttttttgtatttttatgcgattcattgaaactcggccccattttcaaatctacataggccgtactgacattatcgaaatgctattttttatctatttgatttttatgattaaagtatattttgtgtataaaaatcattcgggtcggattgctgcgaaagaaatgatacactagcacgtcaaagtaagtgcgttatcagtattcaggtagctgttgagcctggggcggtagcgtgcttttttctgcttaacttaaccagacaatcacacaaaagagtcgctagtggaaaagccatttcgaaaaatcctggtcataaagatgcgatatcatggggatatgttattaactactcctgtcatcagtacgctcaagcagaattatcctgatgcaaaaatcgatatgctgctttatcaggacaccatccctattttgtctgaaaacccggaaattaatgcgctctatgggataagcaataaaggtgcgggaactttcgataaaattaaaaatgtgctttcgttgataaaaactctgcgtgcgaataattatgacctggtcattaatcttacggatcagtggatggtggcgctgctggtacgttgtttacctgcacggatgaaaatatcgcaactttatggtcatcggcagcatggtatttggaaaaaaagcttcacacacttagcgccaatacacggtacacatattgttgagcgtaatttatcggtccttgagccattaggtattaccgatttctacaccgacacaacaatgagttacgccgaagattgctggaagaagatgcgccgggaattagatgccctgggcgtaaaagatcattatgttgtcatccaaccgacagcgcgtcagatatttaagtgttgggataacgataaattttctaaggttatcgatgcgctgcaacagcgaggctatcaggttgtgctaacctgtgggccctcggcagatgatctcgcttgtgtagatgagattgcacgaggttgcgaaacaaaacccattactggccttgcaggtaaaacacgttttcctgaactgggtgcattaattgatcatgcagtgctttttattggtgtggattctgcgccgggacatattgcagcggcagtgaaaacgccagtcattagtctatttggtgcaacggatcacgtattctggcgtccctggaccgagaatattattcaattctgggcggggaattatcagaaaatgccgacccggcatgaacttgaccgcaacaaaaaatatctttctgttatcccagcggaggatgtgatcgccgctacggaaaagctgttgccagaagatgccccttcagctgacaggaatgcacaattatgatcgtggcgttttgtttatataaatattttccatttggtgggcttcaacgtgactttatgcgcattgcatcaacagttgccgcacggggccaccatgttcgggtatatacacagtcgtgggaaggcgattgcccgaaagcatttgagcttattcaggtgccagttaagtcccataccaaccatggacgcaatgcagaatattatgcctgggtacaaaatcatctcaaagagcatcccgcagatcgcgttgttgggtttaataagatgcctggcctggatgtttattttgccgctgatgtttgttacgccgagaaagttgcgcaagaaaaaggttttttatatcgtttaacatcacgatatcgccattatgccgcatttgagcgagcgactttcgagcagggtaaatcgacgaaacttatgatgctgaccgataagcaaatcgccgatttccagaagcattatcaaactgaacctgaacgttttcaaattcttcctcccggtatttatccggacagaaaatacagtgagcaaatcccaaacagccgtgaaatttatcgccagaaaaatggcataaaagagcaacaaaacttattactgcaggttggatcagattttggccgtaaaggtgtagatcgctcaattgaagctttggcatcgttaccggaatcattacgtcacaatacgcttttatttgttgttggtcaggataagccgcgaaaatttgaagcgctggcagaaaaactcggcgtgcggagcaatgtgcatttcttctccggtcgcaatgatgtgtcagaattaatggcagccgctgatttattactgcatcccgcttatcaggaagccgcgggtatcgttcttctagaagcgatcactgctgggttacctgttttaacaacagcggtatgtgggtacgcgcattatattgcggatgccaattgtggaacggtcatcgctgaacctttctctcaggaacaattaaatgaagttttacgtaaagcgttaactcagtcgccattgcgaatggcctgggcggagaatgctcgccattatgccgatactcaggatttgtatagcttgccagaaaaagccgcggatatcattacaggtggtttagatggttgaattaaaagagccgcttgccacactttggcgtggtaaagatgcttttgcagaggtcaaaaaactgaacggcgaggtctttcgtgaactggagactcgtcgtacattacgctttgaactgtccgggaaaagctattttcttaaatggcacaaggggacgacattaaaagagattataaaaaatctactctcattgcggatgcccgttttgggcgcagacagagagtggcacgctattcatcgcctgagtgatgttggcgttgatacaatgaagggcattgggtttggcgaaaaagggttaaatccattaactcgcgcatcatttattattaccgaagatctcactcccacaattagccttgaagattattgtgccgattgggcagtcaacccgcctgatatacgtgttaagcgtatgctgatcgcacgtgtagcaactatggtgcgtaaaatgcatactgcagggataaatcaccgcgactgttacatttgccactttttgcttcatttgccatttactggccgggaagatgaattaaaaatttcagttatcgatctgcatcgggcacagatacgtgcaaaagtaccgcgccgctggcgcgataaagacctgattggtttatatttctcatcaatgaatattggcctgacgcaaagagatatctggcgatttatgaaggtttattttgggatgcctttacgcaaaatattgtctcttgaacagaatttattgaacatggcaagcgttaaggccgagcgtattaaagagcgaacacaacgcaaaggattataaaaatatttattagtatgtactggaactaactttattatgactatttattttataaattgggttgcagattatgaattaaaaatgattcagtacctgaaaaaaaagtacaagataaaaaatataacaacaccaaaaaaatataactggattaataaaaaaatatcaaaaatagggatggataatgcatggctggggcgattattcatcaagcattacctcaatgatattaaaaaagatgacataattatcattaatgacagtgttgttaataaaggtatcaataaacaaatattaaaaaatattaactgtcataaagttttgcttctaagaaatactgttggcgaagattttattcttgataacgcgaattatttcgatattatatatgattttgagcatagatttatagggaatgaaaagatcaaggcaatagaacaattttttcctataggaatggatgaaattagaaattatagtttatctgacaaaaataacagccagccaatatgttttttccttggtcgtgataaagggcgtcttcaaataattaatgagttagccgagagattaacaacactaggatgtaagctagattttaatgttgtcaaagataagacatcatctacgacttcaaagtatttgattgaaaaacaaatatcttatgaagagaatattagaagaacattaaatgctaatataattgttgatataaccaaagaaaaccaatctggctggactcttcgtatacttgaggcactatttttcaataaaaaattaattactaataatataaatgtatttggttcagaaatctatagtgaatctcgcttttttataataggtcatgatgattgggataagttagagtattttattaactcatctgttaaaccaatggattatgatagtttatataaattcagtccagataaaatgatgtcaacgattgtttctgattttatagacaaataaaaccgttaaaacagtgagttttactcaattaatgagagtttctatgaaaatagcgtttatcggcgaagctgtttctggatttggcggcatggaaactgtcatccgtgatgttattactaccttcaggcaacaacatatccaaagtgaaatgtttttcttttgtcgtaatgacaaaatggataagggatggctggaaggtattaaatactcatgttcattttccaatattcgtttaggttttttgcgtcgggcgaaacatattcatgctctaagtaaatggcttcaggagtaccaaccagatatcgttatttgtattgatgtgatctcctgcctgtttgccgcaaaagcacgtaaaaaatcaggaattgatatgccagtattttcatggccacatttttctttagatcacaaaaaacatgctgaatatatcacctgtgccgactatcatttagcaatcagctctggcattaaacagcaaatgattaatcgaggtgtagcagaatcgacgataaatgttatttttaatcccgtcgaaactaaagactcagtcattcccgcgcccgaggaaggtgaaacggcaacgtttatttatgttgggcgtatgaaatttgaaggccagaaaagagttaaagacctgcttgatggcttatcacaagcgaaaggtaactggaaactccatgtattgggtgatggctccgatttcgaaaaatgccaggcttatggtagagaattaaatattgatgatcgaattgtctggtatggttggcaacaatatccctgggaattggtccagcaagatattgaaaaagtgagtgcgttattgctcacgtcatcttttgaaggtttcccaatgaccctacttgaagccttgtcgtgggggattccttgtatcagtgccgattgtgtctccgggcctgctgacattattcaacctgatgtcaatggccatctgtatcaaccgggagatattgctggttttgtaactcttctaaataaatatatagcaggtgaaattcatatcgaacatgaaaaaattcctgcgtcgatcgatgaattttaccaatcgaagtattacgatagattacataaggtaattatttctgctatttcccggaggaaataatgcagcaggtgtttttccaggaaactgagtttcttaattcagttattgattatgatcataaagtagaaacagaaaatctttgtctggacatcgcttatggaactgacaaaaactttctatttggttgcggaatttcgattgcttcaatattaaaatataatgaaggaagtcgattgtgtttccatatttttactgattattttggtgatgatgatcgtaagtattttgatgccctggcgttgcagtataaaaccagaattaaaatatatctgattaatggtgatcgactgcgctcattgcctagcactaagaattggactcatgcaatatattttcgttttgttattgcagattactttattaataaggcgcctaaagtcctttatctggatgcagatatcatttgtcaggggactattgagccactaattaatttctcatttcctgacgataaagtcgcaatggttgttacagaagggcaagctgactggtgggaaaaacgcgcccattcgttaggtgttgcgggaattgctaaaggttactttaactccggttttttattgattaatactgcccaatgggcggctcagcaggtttctgcacgagctattgcaatgctaaatgagccagaaataatcaaaaaaataacacatcctgatcaggatgtgttaaatatgttgctggcggataaacttattttcgctgatattaaatataacacccagttcagcttaaattatcaactcaaagaaagctttataaacccagtaaccaacgatactatttttatccattatatcgggccaaccaagccctggcatgattgggcctgggattatcctgtatcacaagcctttatggaggcaaaaaatgcttcgccatggaagaatacggcgttgctgaaaccgaacaatagcaatcaattaagatatagcgcaaaacatatgcttaaaaagcatagatatctaaaaggatttagcaactatcttttttattttattgaaaagataaagcattaaaactgggaaactataaagtaatgatataagggtagcattgtggactcatttcctgccatagagatagataaagttaaagcctgggattttcggctagctaatataaatacttctgaatgtttaaatgttgcctatggtgtcgatgctaattatcttgatggtgtaggtgtttccatcacatcaattgtcctaaataatcgacatattaatcttgatttttatattattgctgatgtttataatgatggtttttttcaaaaaattgcaaagcttgcagagcaaaaccaattaagaatcacgttatatagaattaacactgataagctccagtgcttgccttgtacacaggtctggtcaagagcaatgtacttccgtttatttgcatttcaattattgggtttaacgcttgatcgtttgctttatcttgatgcagatgttgtttgtaaaggcgatattagccaactattacatctgggtttaaatggagcggttgctgctgttgttaaagatgttgagccaatgcaagaaaaggcggtatccaggttgtctgatcctgaattacttgggcagtactttaattccggtgtcgtttatttagacttaaaaaaatgggctgacgcaaaactaacagaaaaagcgttgtctattcttatgagtaaagataatgtttataaataccctgatcaggatgttatgaatgtcttactgaaagggatgacattatttttgcctcgtgagtacaatacaatttatacaattaaaagtgaattaaaagacaaaacacatcaaaactataaaaagctgattacagaaagtactcttcttattcattatacaggtgcaactaaaccgtggcacaaatgggcaatttatccatcggtaaaatactataaaatagctttagaaaattccccctggaaagatgactctccacgagatgcgaaatcaattattgaatttaaaaaagatataaacatcttttagtgcaacatcatt

SEQ ID NO: 106 - protein, 344 aa, Escherichia coli
MRYHGDMLLTTPVISTLKQNYPDAKIDMLLYQDTIPILSENPEINALYGISNKGAGTFDKIKNVLSLIKTLRANNYDLVINLTDQWMVALLVRCLPARMKISQLYGHRQHGIWKKSFTHLAPIHGTHIVERNLSVLEPLGITDFYTDTTMSYAEDCWKKMRRELDALGVKDHYVVIQPTARQIFKCWDNDKFSKVIDALQQRGYQVVLTCGPSADDLACVDEIARGCETKPITGLAGKTRFPELGALIDHAVLFIGVDSAPGHIAAAVKTPVISLFGATDHVFWRPWTENIIQFWAGNYQKMPTRHELDRNKKYLSVIPAEDVIAATEKLLPEDAPSADRNAQL

SEQ ID NO: 107 - protein, 371 aa, Escherichia coli
IVAFCLYKYFPFGGLQRDFMRIASTVAARGHHVRVYTQSWEGDCPKAFELIQVPVKSHTNHGRNAEYYAWVQNHLKEHPADRVVGFNKMPGLDVYFAADVCYAEKVAQEKGFLYRLTSRYRHYAAFERATFEQGKSTKLMMLTDKQIADFQKHYQTEPERFQILPPGIYPDRKYSEQIPNSREIYRQKNGIKEQQNLLLQVGSDFGRKGVDRSIEALASLPESLRHNTLLFVVGQDKPRKFEALAEKLGVRSNVHFFSGRNDVSELMAAADLLLHPAYQEAAGIVLLEAITAGLPVLTTAVCGYAHYIADANCGTVIAEPFSQEQLNEVLRKALTQSPLRMAWAENARHYADTQDLYSLPEKAADIITGGL

SEQ ID NO: 108 - protein, 265 aa, Escherichia coli
MVELKEPLATLWRGKDAFAEVKKLNGEVFRELETRRTLRFELSGKSYFLKWHKGTTLKEIIKNLLSLRMPVLGADREWHAIHRLSDVGVDTMKGIGFGEKGLNPLTRASFIITEDLTPTISLEDYCADWAVNPPDIRVKRMLIARVATMVRKMHTAGINHRDCYICHFLLHLPFTGREDELKISVIDLHRAQIRAKVPRRWRDKDLIGLYFSSMNIGLTQRDIWRFMKVYFGMPLRKILSLEQNLLNMASVKAERIKERTQRKGL

SEQ ID NO: 109 - protein, 311 aa, Escherichia coli
MTIYFINWVADYELKMIQYLKKKYKIKNITTPKKYNWINKKISKIGMDNAWLGRLFIKHYLNDIKKDDIIIINDSVVNKGINKQILKNINCHKVLLLRNTVGEDFILDNANYFDIIYDFEHRFIGNEKIKAIEQFFPIGMDEIRNYSLSDKNNSQPICFFLGRDKGRLQIINELAERLTTLGCKLDFNVVKDKTSSTTSKYLIEKQISYEENIRRTLNANIIVDITKENQSGWTLRILEALFFNKKLITNNINVFGSEIYSESRFFIIGHDDWDKLEYFINSSVKPMDYDSLYKFSPDKMMSTIVSDFIDK

SEQ ID NO: 110 - protein, 369 aa, Escherichia coli
VSFTQLMRVSMKIAFIGEAVSGFGGMETVIRDVITTFRQQHIQSEMFFFCRNDKMDKGWLEGIKYSCSFSNIRLGFLRRAKHIHALSKWLQEYQPDIVICIDVISCLFAAKARKKSGIDMPVFSWPHFSLDHKKHAEYITCADYHLAISSGIKQQMINRGVAESTINVIFNPVETKDSVIPAPEEGETATFIYVGRMKFEGQKRVKDLLDGLSQAKGNWKLHVLGDGSDFEKCQAYGRELNIDDRIVWYGWQQYPWELVQQDIEKVSALLLTSSFEGFPMTLLEALSWGIPCISADCVSGPADIIQPDVNGHLYQPGDIAGFVTLLNKYIAGEIHIEHEKIPASIDEFYQSKYYDRLHKVIISAISRRK

SEQ ID NO: 111 - protein, 339 aa, Escherichia coli
MQQVFFQETEFLNSVIDYDHKVETENLCLDIAYGTDKNFLFGCGISIASILKYNEGSRLCFHIFTDYFGDDDRKYFDALALQYKTRIKIYLINGDRLRSLPSTKNWTHAIYFRFVIADYFINKAPKVLYLDADIICQGTIEPLINFSFPDDKVAMVVTEGQADWWEKRAHSLGVAGIAKGYFNSGFLLINTAQWAAQQVSARAIAMLNEPEIIKKITHPDQDVLNMLLADKLIFADIKYNTQFSLNYQLKESFINPVTNDTIFIHYIGPTKPWHDWAWDYPVSQAFMEAKNASPWKNTALLKPNNSNQLRYSAKHMLKKHRYLKGFSNYLFYFIEKIKH

SEQ ID NO: 112 - protein, 314 aa, Escherichia coli
VDSFPAIEIDKVKAWDFRLANINTSECLNVAYGVDANYLDGVGVSITSIVLNNRHINLDFYIIADVYNDGFFQKIAKLAEQNQLRITLYRINTDKLQCLPCTQVWSRAMYFRLFAFQLLGLTLDRLLYLDADVVCKGDISQLLHLGLNGAVAAVVKDVEPMQEKAVSRLSDPELLGQYFNSGVVYLDLKKWADAKLTEKALSILMSKDNVYKYPDQDVMNVLLKGMTLFLPREYNTIYTIKSELKDKTHQNYKKLITESTLLIHYTGATKPWHKWAIYPSVKYYKIALENSPWKDDSPRDAKSIIEFKKDINIF

SEQ ID NO: 113 - DNA, 8391 bp, Mycobacterium bovis
  CDS (1)..(8391)
atgggtacgcgcactggcggccgaggacccggttccgtccgacaagcacctgacgtcggccgccgtgtcggtgcccggcgtgttgcttacccagatcgcggcgacccgggcgctggcccgtcaaggcatggacctcgtggccaccccgccggtcgccatggcgggcattcgcaaggtgtgctggcggtggaagccctcaaggctggtggggcacgcgacgtcgagctgtttgccttggcccagttgatcggtgccgccggaacgctggtggcccgccggcgcgaatttccgtcctgggcgatcgcgccgatggtatcggtcaccaacgccgaccccgagcgcatcggccggttgctcgacgagttcgcccaggacgtgcgcacggtgctgccaccggtgttgtccatccgcaacggccggcgtgccgtcgtcatcaccggcacccccgagcagctgtcgcgtttcgagctttattgccgccagatctccgagaaggaagaagccgaccgcaagaacaaggtccgcggcggcgacgtcttctcgccggtcttcgagccggtgcaggtggaggtgggctttcacaccccgcggctatccgacgggatcgacatcgtcgcgggctgggccgagaaggcgggcctcgatgtcgccttggctcgggagctggccgatgccatcttgatcagaaaggtcgactgggtcgacgagatcacccgtgtccaccgggccggcgcccgctggatcctcgacctggggccgggcgacatcctgacccgactgaccgcaccggtgatccgcggcctgggcatcggcatcgtgccggcgcgtacccgcggtggccagcgcaacctgttcaccgtcggcgccacccccgaggttgcccgggcctggtcgagctacgcaccgaccgtggttcgcctccccgacggcagggtcaagctctcgacgaagttcacccggctgacccgccgctcgccgatcctgctcgcgggcatgaccccgaccaccgtggacgccaagatcgtcgccgcggcggccaacggccggcactgggccgagctggcggcgcggggcaggtcaccgaagagatcttcggtaaccgcatcgaacaaatggccggcctgctcgagccgggccgcacctatcagttcaacgcgctgttcctcgatccctacctgtgaagcttcaggtgggcggcaagcggttggtgcagaaggcccgccagtccggcgccgcgatcgacggcgtggtgatcagcgccggcatcccagacctcgacgaggccgtcgagctgatcgacgaactgggcgacatcggcatcagccacgtcgtgttcaaacccgggaccatcgagcagatccgctcggtgattcgcatcgccaccgaggtgcccaccaagccggtgatcatgcacgtcgagggccgggcgcgccggcgggcaccattcctgggaggatctcacacctgctgctggctacctactcggcagatcgggcaccgcgccaacatcacgtgtgcgtcggcggcggccatctcggcaccccgaagaagggctgcggatatttgtccgggcctgggcgcagcgtacggcttcccattgatgccgatcgacgcatcctggtcggcaccgcggcgatggccaccaaggaatccaccacgtcgccatcggtcaagcggatgctcgtcgacactcagggcaccgaccaatggatcagcgccggaaaagcgcagggccgcatgcctccagccgagtcagctcggtgccgacatccacgagatcgacacagcgcatccgtgcggcgctgctcgacgaggtggccggtgacgcggaggcggtcgcggagcgtcgcatggccaagaccgccaagccctacttgccgacgtcgccgacatgacctacctgcagtggctgcgggcgctacgtcgaactggccatcggggaaggcaactcgaccgccgacaccgcctcggtgggcagcccgtggctggccgacactggcgggaccgcttcgagcagatgctgcagcgtgccgaagcccggttgcacccacaggatttcggcccgatccagacgctattcaccgatgctggcctgctggacaatccgcagcagcgatcgccgccctcgtggcgcgctaccccgacgccgagaccgtgcagttgcatcccgcggatgtgccctttttcgtgacgttgtgcaagacgctgggcaagccggtcaacttcgtgccggcgatcgacctcgtcgtgcgcgctggtggcgcagcgactcgctgtggcaggcccacgacgcccgctacgacgccgatgcggtgtgcatcattccgggcacgcgtcggtagccgcatcacccggatggatgaacccgtcggtgagttgctggacgctttcgagcaagccgcaatcgatgaagtgctcggcgccggtgtcgagccgaaggatgtcgcgtccggccggctgggccgggccgacgtggccggaccgttggctgtcgtcctcgacgcacccgatgtgcgctgggccggtcgcaccgtgaccaacccggtgcatcggatccgcgacccggccgaatggcaggtgcacgatggacccgaaaacccgcgcgccgcacactcatccaccggcgcccggctgcagacgcacggcgacgacgtcgccttgagcgtcgcgcgtctcgggcacctgggtcgacatccgattcacgttgccggccaacaccgtcgatggcggcaccccggtgatcgccaccgaggacgccaccacgccatgcgcacggtgctgcgatcgccgccggtgtcgacagcccggagttcttgctgcggtggccaacgggacggccactttgacggtggactggcaccccgagcgtgttgccgaccacaccgtcaccgccacgttcggtgcgcgctggcacccagcctcaccaacgtgccgacgcgactcgtcggcccttgttggccagcggttttcgcggccatcggatcggcggtcaccgacaccggtgagccggtggtggaaggcctgctgagcctggtgcatctggacacgcggccgcgcgtggtcggtcagctgcccacggtcccggcccaattgaccgtcacgcaacggctgccaacgcaaccgatacggacatgggccgcgtcgtgccggtctcggtcgtcgttcaccgcatggcgccgtgatcgccactctcgaggagcgattcgcgatcctgggtcgcaccggttcgccgagctggaccggcgcgagccggtggcgcggtgtcgcgaacgccaccgacaccccgcgcgtcgccgccgcgacgtcacgatcaccgcgccggtcgacatgcgcccgttcgcggtggtgtccggcgaccacaaccccattcacaccgaccgggccgccgctgcttgccggcctggagtcgccgatcgtgcacggcatgtggctgtcggccgcggcgcaacacgcggtgaccggcaccgacgggcaggcccgccaccggcccggctggtcggctggaccgcgcggtttttgggcatggtggccccggcgacgaggtggacttccggtcgagcgcgtcggatcgaccagggcgcagagattgtggacgtggccgcgcgcgtcgggtcggatctagtgatgtcggcctccgcgcgactggccgcacccaagacggtctacgcattccccggccagggcatccaacacaagggcatgggcatggaggtgcgcgccgctccaaggcggcccgcaaggtgtgggacaccgcggacaagttcacccgcgacaccctgggcttctcggtactgcacgtggtccgcgacaacccgaccagcatcatcgccagcggtgtgcactaccaccaccgacggggtgctctacctgacgcagttcacccaggtcgcgatggcgacggtggcggccgggcaggtcgccgagatgcgtgaacagggagccttcgtcgaaggcgccatcgcgtgcggccactcggtcggcgagtacaccgcgctggcctgcgtgaccggcatctaccaactggaagccttgctggagatggtgtttcaccgcgggtcgaagatgcacgacatcgttccgcgcgacgagctcggccgctccaactatcggctgtcggccatccggccgtcccagatcgacctcgacgacgccgacgtgcccgcgttcgtcgccgggatcgcggagagcaccggtgaattcctggagatcgagaatttcaacctcggtggctcgcaatacgcgatcgcgggcacggtacgcggcctcgaggcgctcgaggccgaggtggagcggcgccgcgagctcaccggcggccgacggtcgttcattttggtgcccggcatcgatgttccgttccactcgcgagtgctgcgggtcggggtggccgaattccggcgctcgctggaccgggtcatgcggccgacgcggacccgacctgatcatcgggcgctacattcccaacctggtgccgcggaagttcaaccctggaccgcgacttcatccaggaaatccgggatttggtgccccgccgagccgctcgacgagatcctcgccgactacgacacctggcttcgcgacgaccggcgagatggcgcgcacggtgttcatcgagctgctggcatggcaattcgccagcccggtgcgctggatcgagacgcaggatctgctgttcatcgaggaggcgccggcgggctgggtgtggagcgattcgtcgagatcggtgtgaagagctcaccgacggtggcggggtcttgccaccaacaccctcaaactgcccgaatacgcccacagcacagtgaagtgctcaacgccgagcgtgatgcgcggtgctgttcgccaccgacaccgacccggagccggagccggaggaagacgagccggtcgcggaatcgcccgcgccggacgtcgtctcggaagccgcccccgtcgcgccggccgcttcgtcggcgggcccgcgtcccgacgatctggttttcgacgccgccgatgccacgctgcgtgatcgcgctctcggccaagatgcgcatcgaccagatcgaagaactcgactccatcgagtccatcaccgacggtgcgtcgtcgcggcgcaaccagctgctggtggacctgggctccgagctgaacctcggtgccattgaacggcgccgccgaatcggacctggccggtctgcgctcacaggtgaccaaactggcgcgcacctacaacgttacggcccagtgctttccgacgccatcaacgaccacgttcgcaccgtcctcggaccgtcgggcaagcggcccggcgccatcgccgagcgggtgaagaagacctgggagctcggtgaggctgggccaagcatgtcaccgtcgaggtcgcgctgggcacccgcgagggcagcagcgttcgcggcggcgccatgggccacctgcacgagggcgcgctggccgatgccgcctccgtcgacaaggtcatcgacgcggcggtcgcatcggtggccgcggccagggcgtttcggtagcgctgcgtcggccggtagtggcggcgccaccatcgacgcggccgcgctcagcgagttcaccgaccaaatcaccggccgtgagggcgtgctgcctccgcggcccgcctggtgctggggcagctgggactggacgaccccatcaaccgttgccggccgccccgattccgagctgatcgacttggtcaccgccgaactgggacggactggccgcggttggtggcaccggtgttcgaccccaagaaggccgtcgtattcgacgaccgctggccagcgcccgcgaggacctggtgaagctgtggctgaccgacggaaggaccgaaggcgacatcgacgccgactggccgcgctggcggagcgcttcgagggtgccgccacgtcgtggcgacccaggctacctggtggcaaggtaagtcgctcgcgcgggccggcagatccatgcatcgctgtacggccgcatgccgccggcgccgagaaccccgaaccccgcgtacggcggcgaagttgccgtggtgaccggcgcttcgaagggttcgatcgccgcgtcggtggtggctcggctgctcgacgcggagccaccgtcatcgcgaccacctccaagctcgacgaggagcggctgcggttctaccgcacgctgtatcgcgaccacgcccgttacggcgcggcgctgtggctggtcgcggcgaacatggcgtcctactccgacgtcgacgccctggtcgaatggatcggcaccgaacagaccgaaagccttgggccgcagtcgattcacatcaaagacgcgcagaccccgacgctgctgttccgttcgcggcgcacgcgtgtcgggactgtcggaggccggttcgcgcgccgagatggagatgaaagtgctgctgtggcggtgcaacggctgatcggcggcctgtcgacgatcggcgccgaacgcgacatgccgtcgcggctcgagcgtggtgctgcccggctcgcccaaccgtggcatgttcggcggcgacgggccctacggcgaagccaagtccgcgctggatgccgtggtgacgcgctggcacgccgagtcgtcctgggcggcacgggtcagcctggcgcacgcgctcatcggctggacccgcggcaccgggctgatgggccacaacgatgccatcgtggccgccgtcgaagaggccggggtcaccacctactcgaccgacgagatggcgcggctgctgctcgacctgtgtcatgcggaatccaaggtggctgcggccgttcgccgatcaaggccgacctgaccgggggcctgccgaggccaacctcgacatggccgagctggcggccaaggcgcgcgagcagatgtcggcagcggcggccgtcgacgaggacgccgaggcccctggcgccatcgccgcgctgccgtcgccgccccggtttcacccccgcaccgccgccgcaatgggacgacctcgatgtcgacccggccgacctggtggtgatcgtcggcggccgcgaaatcggcccgtacggctcgtcacgcacccggttcgagatggaggtcgaaaacgagctgtcggcggccggcgtgctggagctggcctggaccactgggttgatcgctgggagacgacccgcaacccggttggtacgacaccgaatccggcgaaatggtcgacgaatccgagttggtgcagcgctacacgacgccgtggtgcagcgcgtcggcattcgcgaattcgttgatgacggcgcgatcgaccccgaccacgcctcgccgctgctggtgtcggtgttcctggagaaggacttcgcgttcgtggtgtcctcggaggccgatgcgcgcgccttcgtcgagttcgatcccgagcacacggtcatccggccggtgcccgactccaccgactggcaggtcatccgcaaggccggcaccgagatccgggtgccgcgaaagaccaagctgtcccgcgtcgtcggcggccagatcccgaccgggttcgacccgacggtgtggggcatcagcgcagacatggccggttccatcgaccggttggcggtatggaacatgtggcggaccgtcgaccggttcctgtcgtccggtttcagcccggccgaggtgatgcgttacgtgcacccgagtttggtggccaacacccagggcaccggcatgggcggcggcacgtcgatgcagacgatgtaccacggcaatctgttgggccgcaacaagccgaacgacatcttccaggaagtcttgccgatatcattcgccgcgcacgtggttcagtcctacgtcggtagctacggtgcgatgatccacccggtagccgcgtgcgccaccgccgcggtgtcggtcgaggaaggtgtcgacaagatccggttgggaaggctcaactggtggtcggcggccgtggatgacctgacgctggagggcatcatcggattcggtgacatggccgccaccgccgacacgtccatgatgcgcggccgcggcatccacgactcgaagttttcccggcccaacgaccgccgccgtctggcttcgtcgaagcccaaggcggcgggacgatcctgttgggcgcggggacctggcgctgcggatggggctgccggtgctggcggtggtgggttcgcgcagtcgttcggcgacggcgtgcacacctcgatccgccccgggcctgggcgcgctgggggcggcgcgcggcggcaaggattcagctgcggcgggcgctggccaagctgcgtggccgccgacgacgtggcggtcatctccaagcacgacacctcgacgctggccaacgatcccaacgagaccgagttgcatgaacggctcgccgacgccctgggccgttccgagggcgccccgctgttcgtggtgtcgcagaagagcctgaccggccagccaagggcggcgcggcggtcttccagatga

SEQ ID NO: 114 - protein, 2796 aa, Mycobacterium bovis
MGTRTGGRGPGSVRQAPDVGRRVGARRVAYPDRGDPGAGPSRHGPRGHPAGRHGGHSQGVLAVEALKAGGARDVELFALAQLIGAAGTLVARRREFPSWAIAPMVSVTNADPERIGRLLDEFAQDVRTVLPPVLSIRNGRRAVVITGTPEQLSRFELYCRQISEKEEADRKNKVRGGDVFSPVFEPVQVEVGFHTPRLSDGIDIVAGWAEKAGLDVALARELADAILIRKVDWVDEITRVHRAGARWILDLGPGDILTRLTAPVIRGLGIGIVPARTRGGQRNLFTVGATPEVARAWSSYAPTVVRLPDGRVKLSTKFTRLTRRSPILLAGMTPTTVDAKIVAAAANGRHWAELAARGRSPKRSSVTASNKWPACSSRAAPISSTRCSSIPTCEASGGRQAVGAEGPPVRRRDRRRGDQRRHPRPRRGRRADRRTGRHRHQPRRVQTRDHRADPLGDSHRHRGAHQAGDHARRGPGAPAGTIPGRISHLLLATYSADRAPRQHHVCVGGGHLGTPKKGCGYLSGPGRSVRLPIDADRRILVGTAAMATKESTTSPSVKRMLVDTQGTDQWISAGKAQGRMPPAESARCRHPRDRHSASVRRCSTRWPVTRRRSRSVAWPRPPSPTCRRRRHDLPAVAAGATSNWPSGKATRPPTPPRWAARGWPTLAGPLRADAAACRSPVAPTGFRPDPDAIHRCWPAGQSAAAIAALVARYPDAETVQLHPADVPFFVTLCKTLGKPVNFVPAIDLVVRAGGAATRCGRPTTPATTPMRCASFRARVGSRITRMDEPVGELLDAFEQAAIDEVLGAGVEPKDVASGRLGRADVAGPLAVVLDAPDVRWAGRTVTNPVHRIRDPAEWQVHDGPENPRAAHSSTGARLQTHGDDVALSVARLGHLGRHPIHVAGQHRRWRHPGDRHRGRHHAMRTVLRSPPVSTARSSCCGGQRDGHFDGGLAPRACCRPHRHRHVRCALAPSLTNVPTRLVGPCWPAVFAAIGSAVTDTGEPVVEGLLSLVHLDTRPRVVGQLPTVPAQLTVTQRLPTQPIRTWAASCRSRSSFTAWRRDRHSRGAIRDPGSHRFAELDRREPVARCRERHRHPARRRRDVTITAPVDMRPFAVVSGDHNPIHTDRAAAACRPGVADRARHVAVGRGATRGDRHRRAGPPPARLVGWTARFLGMVAPATRWTSGRARRIDQGAEIVDVAARVGSDLVMSASARLAAPKTVYAFPGQGIQHKGMGMEVRAAPRRPARCGTPRTSSPATPWASRYCTWSATTRPASSPAVCTTTTDGVLYLTQFTQVAMATVAAGQVAEMREQGAFVEGAIACGHSVGEYTALACVTGIYQLEALLEMVFHRGSKMHDIVPRDELGRSNYRLSAIRPSQIDLDDADVPAFVAGIAESTGEFLEIENFNLGGSQYAIAGTVRGLEALEAEVERRRELTGGRRSFILVPGIDVPFHSRVLRVGVAEFRRSLDRVMRPTRTRPDHRALHSQPGAAEVQPWTATSSRKSGIWCPAEPLDEILADYDTWLRDDRRDGAHGVHRAAGMAIRQPGALDRDAGSAVHRGGAGGLGVERFVEIGVKSSPTVAGSCHQHPQTARIRPQHSEVLNAERDARCCSPPTPTRSRSRRKTSRSRNRPRRTSSRKPPPSRRPLRRRARVPTIWFSTPPMPRCVIALSAKMRIDQIEELDSIESITDGASSRRNQLLVDLGSELNLGAIERRRRIGPGRSALTGDQTGAHLQRYGPVLSDAINDHVRTVLGPSGKRPGAIAERVKKTWELGEAGPSMSPSRSRWAPARAAAFAAAPWATCTRARWPMPPPSTRSSTRRSHRWPRPGRFGSAASAGSGGATIDAAALSEFTDQITGREGVLPPRPAWCWGSWDWTTPSTVAGRPDSELIDLVTAELGRTGRGWWHRCSTPRRPSYSTTAGQRPRGPGEAVADRRKDRRRHRRRLAALAERFEGAATSWRPRLPGGKVSRSRGPADPCIAVRPHAAGAENPEPRVRRRSCRGDRRFEGFDRRVGGGSAARRGATVIATTSKLDEERLRFYRTLYRDHARYGAALWLVAANMASYSDVDALVEWIGTEQTESLGPQSIHIKDAQTPTLLFRSRRTRVGTVGGRFARRDGDESAAVAVQRLIGGLSTIGAERDMPSRLERGAARLAQPWHVRRRRALRRSQVRAGCRGDALARRVVLGGTGQPGARAHRLDPRHRADGPQRCHRGRRRRGRGHHLLDRRDGAAAARPVSCGIQGGCGRSPIKADLTGGLPRPTSTWPSWRPRRASRCRQRRPSTRTPRPLAPSPRCRRRPGFTPAPPPQWDDLDVDPADLVVIVGGREIGPYGSSRTRFEMEVENELSAAGVLELAWTTGLIAGRRPATRLVRHRIRRNGRRIRVGAALHDAVVQRVGIREFVDDGAIDPDHASPLLVSVFLEKDFAFVVSSEADARAFVEFDPEHTVIRPVPDSTDWQVIRKAGTEIRVPRKTKLSRVVGGQIPTGFDPTVWGISADMAGSIDRLAVWNMWRTVDRFLSSGFSPAEVMRYVHPSLVANTQGTGMGGGTSMQTMYHGNLLGRNKPNDIFQEVLPISFAAHVVQSYVGSYGAMIHPVAACATAAVSVEEGVDKIRLGRLNWWSAAVDDLTLEGIIGFGDMAATADTSMMRGRGIHDSKFSRPNDRRRLASSKPKAAGRSCWARGPGAADGAAGAGGGGFAQSFGDGVHTSIRPGPGRAGGGARRQGFSCGGRWPSCVAADDVAVISKHDTSTLANDPNETELHERLADALGRSEGAPLFVVSQKSLTGQPRAARRSSR

SEQ ID NO: 115 - DNA, 192 bp, Homo sapiens
  CDS (1)..(192)
gatcttgctgcccgaaactgcctggtaggggagaaccacttggtgaaggtagctgattttggcctgagcaggttgatgacaggggacacctacacagcccatgctggagccaagttccccatcaaatggactgcacccgagagcctggcctacaacaagttctccatcaagtccgacgtctggggtaagggc

SEQ ID NO: 116 - protein, 64 aa, Homo sapiens
DLAARNCLVGENHLVKVADFGLSRLMTGDTYTAHAGAKFPIKWTAPESLAYNKFSIKSDVWGKG

SEQ ID NO: 117 - DNA, 3955 bp, Rattus norvegicus
  CDS (17)..(3799)
ccgggccggagccgcaatgatcatcatggagctggcggcctggtgccgctgggggttcctcctcgccctcctgccccccggaatcgcgggcacccaagtgtgtaccggcacagacatgaagttgcggctccctgccagtcctgagacccacctggacatgctccgccacctgtaccagggctgtcaggtagtgcagggcaacttggagcttacctacgtgcctgccaatgccagcctctcattcctgcaggacatccaggaagttcagggttacatgctcatcgctcacaaccaggtgaagcgcgtcccactgcaaaggctgcgcatcgtgagagggacccagctctttgaggacaagtatgccctggctgtgctagacaaccgagatcctcaggacaatgtcgccgcctccaccccaggcagaaccccagaggggctgcgggagctgcagcttcgaagtctcacagagatcctgaagggaggagttttgatccgtgggaaccctcagctctgctaccaggacatggttttgtggaaggacgtcttccgcaagaataaccaactggctcctgtcgatatagacaccaatcgttcccgggcctgtccaccttgtgcccccgcctgcaaagacaatcactgttggggtgagagtccggaagactgtcagatcttgactggcaccatctgtaccagtggttgtgcccggtgcaagggccggctgcccactgactgctgccatgagcagtgtgccgcaggctgcacgggccccaagcattctgactgcctggcctgcctccacttcaatcatagtggtatctgtgagctgcactgcccagccctcgtcacctacaacacagacacctttgagtccatgcacaaccctgagggtcgctacacctttggtgccagctgcgtgaccacctgcccctacaactacctgtctacggaagtgggatcctgcactctggtgtgtcccccgaataaccaagaggtcacagctgaggacggaacacagcgttgtgagaaatgcagcaagccctgtgctcgagtgtgctatggtctgggcatggagcaccttcgaggggcgagggccatcaccagtgacaatgtccaggagtttgatggctgcaagaagatctttgggagcctggcatttttgccggagagctttgatggggacccctcctccggcattgctccgctgaggcctgagcagctccaagtgttcgaaaccctggaggagatcacaggttacctgtacatctcagcatggccagacagtctccgtgacctcagtgtcttccagaaccttcgaatcattcggggacggattctccacgatggcgcgtactcattgacactgcaaggcctggggatccactcgctggggctgcgctcactgcgggagctgggcagtggattggctctgattcaccgcaacgcccatctctgctttgtacacactgtaccttgggaccagctcttccggaacccacatcaggccctgctccacagtgggaaccggccggaagaggacttgtgcgtctcgagcggcttggtctgtaactcactgtgtgcccacgggcactgctgggggccagggcccacccagtgtgtcaactgcagtcatttccttcggggccaggagtgtgtggaggagtgccgagtatggaaggggctcccccgggagtatgtgagtgacaagcgctgtctgccgtgtcaccccgagtgtcagcctcaaaacagctcagagacctgctttggatcggaggctgatcagtgtgcagcctgcgcccactacaaggactcgtcctcctgtgtggctcgctgccccagtggtgtgaaaccggacctctcctacatgcccatctggaagtacccggatgaggagggcatatgccagccgtgccccatcaactgcacccactcctgtgtggatctggatgaacgaggctgcccagcagagcagagagccagcccggtgacattcatcattgcaactgtagagggcgtcctgctgttcctgatcttagtggtggtcgttggaatcctaatcaaacgaaggagacagaagatccggaagtatacgatgcgtaggctgctgcaggaaactgagttagtggagccgctgacgcccagcggagcaatgcccaaccaggctcagatgcggatcctaaaagagacggagctaaggaaggtgaaggtgcttggatcaggagcttttggcactgtctacaagggcatctggatcccagatggggagaatgtgaaaatccccgtggctatcaaggtgttgagagaaaacacatctcctaaagccaacaaagaaattctagatgaagcgtatgtgatggctggtgtgggttctccgtatgtgtcccgcctcctgggcatctgcctgacatccacagtacagctggtgacacagcttatgccctacggctgccttctggaccatgtccgagaacaccgaggtcgcctaggctcccaggacctgctcaactggtgtgttcagattgccaaggggatgagctacctggaggacgtgcggcttgtacacagggacctggctgcccggaatgtgctagtcaagagtcccaaccacgtcaagattacagatttcgggctggctcggctgctggacattgatgagacagagtaccatgcagatgggggcaaggtgcccatcaaatggatggcattggaatctattctcagacgccggttcacccatcagagtgatgtgtggagctatggagtgactgtgtgggagctgatgacttttggggccaaaccttacgatggaatcccagcccgggagatccctgatttgctggagaagggagaacgcctacctcagcctccaatctgcaccattgatgtctacatgattatggtcaaatgttggatgattgactctgaatgtcgcccgagattccgggagttggtgtcagaattttcacgtatggcgagggacccccagcgttttgtggtcatccagaacgaggacttgggcccatccagccccatggacagtaccttctaccgttcactgctggaagatgatgacatgggtgacctggtagacgctgaagagtatctggtgccccagcagggattcttctccccggaccctaccccaggcactgggagcacagcccatagaaggcaccgcagctcgtccaccaggagtggaggtggtgagctgacactgggcctggagccctcggaagaagggccccccagatctccactggctccctcggaaggggctggctccgatgtgtttgatggtgacctggcaatgggggtaaccaaagggctgcagagcctctctccacatgacctcagccctctacagcggtacagcgaggaccccacattacctctgccccccgagactgatggctatgttgctcccctggcctgcagcccccagcccgagtatgtgaaccaatcagaggttcagcctcagcctcctttaaccccagagggtcctctgcctcctgtccggcctgctggtgctactctagaaagacccaagactctctctcctgggaagaatggggttgtcaaagacgtttttgccttcgggggtgctgtggagaaccctgaatacttagtaccgagagaaggcactgcctctccgccccacccttctcctgccttcagcccagcctttgacaacctctattactgggaccagaactcatcggagcaggggcctccaccaagtaactttgaagggacccccactgcagagaaccctgagtacctaggcctggatgtacctgtatgagacgtgtgcagacgtcctgtgctttcagagtggggaaggcctgacttgtggtctccatcgccacaaagcagggagagggtcctctggccacattacatccagggcagacggctctaccaggaacctgccccgaggaacctttccttgctgcttgaa

SEQ ID NO: 118 - protein, 1260 aa, Rattus norvegicus
MIIMELAAWCRWGFLLALLPPGIAGTQVCTGTDMKLRLPASPETHLDMLRHLYQGCQVVQGNLELTYVPANASLSFLQDIQEVQGYMLIAHNQVKRVPLQRLRIVRGTQLFEDKYALAVLDNRDPQDNVAASTPGRTPEGLRELQLRSLTEILKGGVLIRGNPQLCYQDMVLWKDVFRKNNQLAPVDIDTNRSRACPPCAPACKDNHCWGESPEDCQILTGTICTSGCARCKGRLPTDCCHEQCAAGCTGPKHSDCLACLHFNHSGICELHCPALVTYNTDTFESMHNPEGRYTFGASCVTTCPYNYLSTEVGSCTLVCPPNNQEVTAEDGTQRCEKCSKPCARVCYGLGMEHLRGARAITSDNVQEFDGCKKIFGSLAFLPESFDGDPSSGIAPLRPEQLQVFETLEEITGYLYISAWPDSLRDLSVFQNLRIIRGRILHDGAYSLTLQGLGIHSLGLRSLRELGSGLALIHRNAHLCFVHTVPWDQLFRNPHQALLHSGNRPEEDLCVSSGLVCNSLCAHGHCWGPGPTQCVNCSHFLRGQECVEECRVWKGLPREYVSDKRCLPCHPECQPQNSSETCFGSEADQCAACAHYKDSSSCVARCPSGVKPDLSYMPIWKYPDEEGICQPCPINCTHSCVDLDERGCPAEQRASPVTFIIATVEGVLLFLILVVVVGILIKRRRQKIRKYTMRRLLQETELVEPLTPSGAMPNQAQMRILKETELRKVKVLGSGAFGTVYKGIWIPDGENVKIPVAIKVLRENTSPKANKEILDEAYVMAGVGSPYVSRLLGICLTSTVQLVTQLMPYGCLLDHVREHRGRLGSQDLLNWCVQIAKGMSYLEDVRLVHRDLAARNVLVKSPNHVKITDFGLARLLDIDETEYHADGGKVPIKWMALESILRRRFTHQSDVWSYGVTVWELMTFGAKPYDGIPAREIPDLLEKGERLPQPPICTIDVYMIMVKCWMIDSECRPRFRELVSEFSRMARDPQRFVVIQNEDLGPSSPMDSTFYRSLLEDDDMGDLVDAEEYLVPQQGFFSPDPTPGTGSTAHRRHRSSSTRSGGGELTLGLEPSEEGPPRSPLAPSEGAGSDVFDGDLAMGVTKGLQSLSPHDLSPLQRYSEDPTLPLPPETDGYVAPLACSPQPEYVNQSEVQPQPPLTPEGPLPPVRPAGATLERPKTLSPGKNGVVKDVFAFGGAVENPEYLVPREGTASPPHPSPAFSPAFDNLYYWDQNSSEQGPPPSNFEGTPTAENPEYLGLDVPV

SEQ ID NO: 119 - DNA, 4989 bp, Homo sapiens
  CDS (46)..(4149)
ttttttttttttttgagaaagggaatttcatcccaaataaaaggaatgaagtctggctccggaggagggtccccgacctcgctgtgggggctcctgtttctctccgccgcgctctcgctctggccgacgagtggagaaatctgcgggccaggcatcgacatccgcaacgactatcagcagctgaagcgcctggagaactgcacggtgatcgagggctacctccacatcctgctcatctccaaggccgaggactaccgcagctaccgcttccccaagctcacggtcattaccgagtacttgctgctgttccgagtggctggcctcgagagcctcggagacctcttccccaacctcacggtcatccgcggctggaaactcttctacaactacgccctggtcatcttcgagatgaccaatctcaaggatattgggctttacaacctgaggaacattactcggggggccatcaggattgagaaaaatgctgacctctgttacctctccactgtggactggtccctgatcctggatgcggtgtccaataactacattgtggggaataagcccccaaaggaatgtggggacctgtgtccagggaccatggaggagaagccgatgtgtgagaagaccaccatcaacaatgagtacaactaccgctgctggaccacaaaccgctgccagaaaatgtgcccaagcacgtgtgggaagcgggcgtgcaccgagaacaatgagtgctgccaccccgagtgcctgggcagctgcagcgcgcctgacaacgacacggcctgtgtagcttgccgccactactactatgccggtgtctgtgtgcctgcctgcccgcccaacacctacaggtttgagggctggcgctgtgtggaccgtgacttctgcgccaacatcctcagcgccgagagcagcgactccgaggggtttgtgatccacgacggcgagtgcatgcaggagtgcccctcgggcttcatccgcaacggcagccagagcatgtactgcatcccttgtgaaggtccttgcccgaaggtctgtgaggaagaaaagaaaacaaagaccattgattctgttacttctgctcagatgctccaaggatgcaccatcttcaagggcaatttgctcattaacatccgacgggggaataacattgcttcagagctggagaacttcatggggctcatcgaggtggtgacgggctacgtgaagatccgccattctcatgccttggtctccttgtccttcctaaaaaaccttcgcctcatcctaggagaggagcagctagaagggaattactccttctacgtcctcgacaaccagaacttgcagcaactgtgggactgggaccaccgcaacctgaccatcaaagcagggaaaatgtactttgctttcaatcccaaattatgtgtttccgaaatttaccgcatggaggaagtgacggggactaaagggcgccaaagcaaaggggacataaacaccaggaacaacggggagagagcctcctgtgaaagtgacgtcctgcatttcacctccaccaccacgtcgaagaatcgcatcatcataacctggcaccggtaccggccccctgactacagggatctcatcagcttcaccgtttactacaaggaagcaccctttaagaatgtcacagagtatgatgggcaggatgcctgcggctccaacagctggaacatggtggacgtggacctcccgcccaacaaggacgtggagcccggcatcttactacatgggctgaagccctggactcagtacgccgtttacgtcaaggctgtgaccctcaccatggtggagaacgaccatatccgtggggccaagagtgagatcttgtacattcgcaccaatgcttcagttccttccattcccttggacgttctttcagcatcgaactcctcttctcagttaatcgtgaagtggaaccctccctctctgcccaacggcaacctgagttactacattgtgcgctggcagcggcagcctcaggacggctacctttaccggcacaattactgctccaaagacaaaatccccatcaggaagtatgccgacggcaccatcgacattgaggaggtcacagagaaccccaagactgaggtgtgtggtggggagaaagggccttgctgcgcctgccccaaaactgaagccgagaagcaggccgagaaggaggaggctgaataccgcaaagtctttgagaatttcctgcacaactccatcttcgtgcccagacctgaaaggaagcggagagatgtcatgcaagtggccaacaccaccatgtccagccgaagcaggaacaccacggccgcagacacctacaacatcaccgacccggaagagctggagacagagtaccctttctttgagagcagagtggataacaaggagagaactgtcatttctaaccttcggcctttcacattgtaccgcatcgatatccacagctgcaaccacgaggctgagaagctgggctgcagcgcctccaacttcgtctttgcaaggactatgcccgcagaaggagcagatgacattcctgggccagtgacctgggagccaaggcctgaaaactccatctttttaaagtggccggaacctgagaatcccaatggattgattctaatgtatgaaataaaatacggatcacaagttgaggatcagcgagaatgtgtgtccagacaggaatacaggaagtatggaggggccaagctaaaccggctaaacccggggaactacacagcccggattcaggccacatctctctctgggaatgggtcgtggacagatcctgtgttcttctatgtccaggccaaaacaggatatgaaaacttcatccatctgatcatcgctctgcccgtcgctgtcctgttgatcgtgggagggttggtgattatgctgtacgtcttccatagaaagagaaataacagcaggctggggaatggagtgctgtatgcctctgtgaacccggagtacttcagcgctgctgatgtgtacgttcctgatgagtgggaggtggctcgggagaagatcaccatgagccgggaacttgggcaggggtcgtttgggatggtctatgaaggagttgccaagggtgtggtgaaagatgaacctgaaaccagagtggccattaaaacagtgaacgaggccgcaagcatgcgtgagaggattgagtttctcaacgaagcttctgtgatgaaggagttcaattgtcaccatgtggtgcgattgctgggtgtggtgtcccaaggccagccaacactggtcatcatggaactgatgacacggggcgatctcaaaagttatctccggtctctgaggccagaaatggagaataatccagtcctagcacctccaagcctgagcaagatgattcagatggccggagagattgcagacggcatggcatacctcaacgccaataagttcgtccacagagaccttgctgcccggaattgcatggtagccgaagatttcacagtcaaaatcggagattttggtatgacgcgagatatctatgagacagactattaccggaaaggaggcaaagggctgctgcccgtgcgctggatgtctcctgagtccctcaaggatggagtcttcaccacttactcggacgtctggtccttcggggtcgtcctctgggagatcgccacactggccgagcagccctaccagggcttgtccaacgagcaagtccttcgcttcgtcatggagggcggccttctggacaagccagacaactgtcctgacatgctgtttgaactgatgcgcatgtgctggcagtataaccccaagatgaggccttccttcctggagatcatcagcagcatcaaagaggagatggagcctggcttccgggaggtctccttctactacagcgaggagaacaagctgcccgagccggaggagctggacctggagccagagaacatggagagcgtccccctggacccctcggcctcctcgtcctccctgccactgcccgacagacactcaggacacaaggccgagaacggccccggccctggggtgctggtcctccgcgccagcttcgacgagagacagccttacgcccacatgaacgggggccgcaagaacgagcgggccttgccgctgccccagtcttcgacctgctgatccttggatcctgaatctgtgcaaacagtaacgtgtgcgcacgcgcagcggggtggggggggagagagagttttaacaatccattcacaagcctcctgtacctcagtggatcttcagttctgcccttgctgcccgcgggagacagcttctctgcagtaaaacacatttgggatgttccttttttcaatatgcaagcagctttttattccctgcccaaacccttaactgacatgggcctttaagaaccttaatgacaacacttaatagcaacagagcacttgagaaccagtctcctcactctgtccctgtccttccctgttctccctttctctctcctctctgcttcataacggaaaaataattgccacaagtccagctgggaagccctttttatcagtttgaggaagtggctgtccctgtggccccatccaaccactgtacacacccgcctgacaccgtgggtcattacaaaaaaacacgtggagatggaaatttttacctttatctttcacctttctagggacatgaaatttacaaagggccatcgttcatccaaggctgttaccattttaacgctgcctaattttgccaaaatcctgaactttctccctcatcggcccggcgctgattcctcgtgtccggaggcatgggtgagcatggcagctggttgctccatttgagagacacgctggcgacacactccgtccatccgactgcccctgctgtgctgctcaaggccacaggcacacaggtctcattgcttctgactagattattatttgggggaactggacacaataggtctttctctcagtgaaggtggggagaagctgaaccggc

SEQ ID NO: 120 - protein, 1367 aa, Homo sapiens
MKSGSGGGSPTSLWGLLFLSAALSLWPTSGEICGPGIDIRNDYQQLKRLENCTVIEGYLHILLISKAEDYRSYRFPKLTVITEYLLLFRVAGLESLGDLFPNLTVIRGWKLFYNYALVIFEMTNLKDIGLYNLRNITRGAIRIEKNADLCYLSTVDWSLILDAVSNNYIVGNKPPKECGDLCPGTMEEKPMCEKTTINNEYNYRCWTTNRCQKMCPSTCGKRACTENNECCHPECLGSCSAPDNDTACVACRHYYYAGVCVPACPPNTYRFEGWRCVDRDFCANILSAESSDSEGFVIHDGECMQECPSGFIRNGSQSMYCIPCEGPCPKVCEEEKKTKTIDSVTSAQMLQGCTIFKGNLLINIRRGNNIASELENFMGLIEVVTGYVKIRHSHALVSLSFLKNLRLILGEEQLEGNYSFYVLDNQNLQQLWDWDHRNLTIKAGKMYFAFNPKLCVSEIYRMEEVTGTKGRQSKGDINTRNNGERASCESDVLHFTSTTTSKNRIIITWHRYRPPDYRDLISFTVYYKEAPFKNVTEYDGQDACGSNSWNMVDVDLPPNKDVEPGILLHGLKPWTQYAVYVKAVTLTMVENDHIRGAKSEILYIRTNASVPSIPLDVLSASNSSSQLIVKWNPPSLPNGNLSYYIVRWQRQPQDGYLYRHNYCSKDKIPIRKYADGTIDIEEVTENPKTEVCGGEKGPCCACPKTEAEKQAEKEEAEYRKVFENFLHNSIFVPRPERKRRDVMQVANTTMSSRSRNTTAADTYNITDPEELETEYPFFESRVDNKERTVISNLRPFTLYRIDIHSCNHEAEKLGCSASNFVFARTMPAEGADDIPGPVTWEPRPENSIFLKWPEPENPNGLILMYEIKYGSQVEDQRECVSRQEYRKYGGAKLNRLNPGNYTARIQATSLSGNGSWTDPVFFYVQAKTGYENFIHLIIALPVAVLLIVGGLVIMLYVFHRKRNNSRLGNGVLYASVNPEYFSAADVYVPDEWEVAREKITMSRELGQGSFGMVYEGVAKGVVKDEPETRVAIKTVNEAASMRERIEFLNEASVMKEFNCHHVVRLLGVVSQGQPTLVIMELMTRGDLKSYLRSLRPEMENNPVLAPPSLSKMIQMAGEIADGMAYLNANKFVHRDLAARNCMVAEDFTVKIGDFGMTRDIYETDYYRKGGKGLLPVRWMSPESLKDGVFTTYSDVWSFGVVLWEIATLAEQPYQGLSNEQVLRFVMEGGLLDKPDNCPDMLFELMRMCWQYNPKMRPSFLEIISSIKEEMEPGFREVSFYYSEENKLPEPEELDLEPENMESVPLDPSASSSSLPLPDRHSGHKAENGPGPGVLVLRASFDERQPYAHMNGGRKNERALPLPQSSTC

SEQ ID NO: 121 - DNA, 640 bp, Homo sapiens
  CDS (17)..(592)
tcgggcctccgaaaccatgaactttctgctgtcttgggtgcattggagccttgccttgctgctctacctccaccatgccaagtggtcccaggctgcacccatggcagaaggaggggggcagaatcatcacgaagtggtgaagttcatggatgtctatcagcgcagctactgccatccaatcgagaccctggtggacatcttccaggagtaccctgatgagatcgagtacatcttcaagccatcctgtgtgcccctgatgcgatgcgggggctgctgcaatgacgagggcctggagtgtgtgcccactgaggagtccaacatcaccatgcagattatgcggatcaaacctcaccaaggccagcacataggagagatgagcttcctacagcacaacaaatgtgaatgcagaccaaagaaagatagagcaagacaagaaaatccctgtgggccttgctcagagcggagaaagcatttgtttgtacaagatccgcagacgtgtaaatgttcctgcaaaaacacagactcgcgttgcaaggcgaggcagcttgagttaaacgaacgtacttgcagatgtgacaagccgaggcggtgagccgggcaggaggaaggagcctccctcagggtttcgggaaccagatct

SEQ ID NO: 122 - protein, 191 aa, Homo sapiens
MNFLLSWVHWSLALLLYLHHAKWSQAAPMAEGGGQNHHEVVKFMDVYQRSYCHPIETLVDIFQEYPDEIEYIFKPSCVPLMRCGGCCNDEGLECVPTEESNITMQIMRIKPHQGQHIGEMSFLQHNKCECRPKKDRARQENPCGPCSERRKHLFVQDPQTCKCSCKNTDSRCKARQLELNERTCRCDKPRR

SEQ ID NO: 123 - DNA, 3690 bp, Mus musculus
  CDS (256)..(3690)
ctggaggggtataaatacctgatggctgctgccagggtcacaactttacagggagttgaagactgagactctggccccacgggacacagtgtcactggtttgaaacttctcagccaccttggtgaagggactgagctgttagagacacttctgaggctcctcacgcttgggtcttgttcactccacggagtagcctagtcaactgcaagagaacggagaacgttggatttggagcagaagtgcaaagtctcagacatggcttgcccctggaagtttctcttcaaagtcaaatcctaccaaagtgacctgaaagaggaaaaggacattaacaacaacgtgaagaaaaccccttgtgctgttctcagcccaacaatacaagatgaccctaagagtcaccaaaatggctccccgcagctcctcactgggacagcacagaatgttccagaatccctggacaagctgcatgtgacatcgacccgtccacagtatgtgaggatcaaaaactggggcagtggagagattttgcatgacactcttcaccacaaggccacatcggatttcacttgcaagtccaagtcttgcttggggtccatcatgaaccccaagagtttgaccagaggacccagagacaagcctacccctctggaggagctcctgcctcatgccattgagttcatcaaccagtattatggctcctttaaagaggcaaaaatagaggaacatctggccaggctggaagctgtaacaaaggaaatagaaacaacaggaacctaccagctcactctggatgagctcatctttgccaccaagatggcctggaggaatgcccctcgctgcatcggcaggatccagtggtccaacctgcaggtctttgacgctcggaactgtagcacagcacaggaaatgtttcagcacatctgcagacacatactttatgccaccaacaatggcaacatcaggtcggccatcactgtgttcccccagcggagtgacggcaaacatgacttcaggctctggaattcacagctcatccggtacgctggctaccagatgcccgatggcaccatcagaggggatgctgccaccttggagttcacccagttgtgcatcgacctaggctggaagccccgctatggccgctttgatgtgctgcctctggtcttgcaagctgatggtcaagatccagaggtctttgaaatccctcctgatcttgtgttggaggtgaccatggagcatcccaagtacgagtggttccaggagctcgggttgaagtggtatgcactgcctgccgtggccaacatgctactggaggtgggtggcctcgaattcccagcctgccccttcaatggttggtacatgggcaccgagattggagttcgagacttctgtgacacacagcgctacaacatcctggaggaagtgggccgaaggatgggcctggagacccacacactggcctccctctggaaagaccgggctgtcacggagatcaatgtggctgtgctccatagtttccagaagcagaatgtgaccatcatggaccaccacacagcctcagagtccttcatgaagcacatgcagaatgagtaccgggcccgtggaggctgcccggcagactggatttggctggtccctccagtgtctgggagcatcacccctgtgttccaccaggagatgttgaactatgtcctatctccattctactactaccagatcgagccctggaagacccacatctggcagaatgagaagctgaggcccaggaggagagagatccgatttagagtcttggtgaaagtggtgttctttgcttccatgctaatgcgaaaggtcatggcttcacgggtcagagccacagtcctctttgctactgagacagggaagtctgaagcactagccagggacctggccaccttgttcagctacgccttcaacaccaaggttgtctgcatggaccagtataaggcaagcaccttggaagaggagcaactactgctggtggtgacaagcacatttgggaatggagactgtcccagcaatgggcagactctgaagaaatctctgttcatgcttagagaactcaaccacaccttcaggtatgctgtgtttggccttggctccagcatgtaccctcagttctgcgcctttgctcatgacatcgaccagaagctgtcccacctgggagcctctcagcttgccccaacaggagaaggggacgaactcagtgggcaggaggatgccttccgcagctgggctgtacaaaccttccgggcagcctgtgagacctttgatgtccgaagcaaacatcacattcagatcccgaaacgcttcacttccaatgcaacatgggagccacagcaatataggctcatccagagcccggagcctttagacctcaacagagccctcagcagcatccatgcaaagaacgtgtttaccatgaggctgaaatcccagcagaatctgcagagtgaaaagtccagccgcaccaccctcctcgttcagctcaccttcgagggcagccgagggcccagctacctgcctggggaacacctggggatcttcccaggcaaccagaccgccctggtgcagggaatcttggagcgagttgtggattgtcctacaccacaccaaactgtgtgcctggaggttctggatgagagcggcagctactgggtcaaagacaagaggctgcccccctgctcactcagccaagccctcacctacttcctggacattacgacccctcccacccagctgcagctccacaagctggctcgctttgccacggacgagacggataggcagagattggaggccttgtgtcagccctcagagtacaatgactggaagttcagcaacaaccccacgttcctggaggtgcttgaagagttcccttccttgcatgtgcccgctgccttcctgctgtcgcagctccctatcttgaagccccgctactactccatcagctcctcccaggaccacaccccctcggaggttcacctcactgtggccgtggtcacctaccgcacccgagatggtcagggtcccctgcaccatggtgtctgcagcacttggatcaggaacctgaagccccaggacccagtgccctgctttgtgcgaagtgtcagtggcttccagctccctgaggacccctcccagccttgcatcctcattgggcctggtacgggcattgctcccttccgaagtttctggcagcagcggctccatgactcccagcacaaagggctcaaaggaggccgcatgagcttggtgtttgggtgccggcacccggaggaggaccacctctatcaggaagaaatgcaggagatggtccgcaagagagtgctgttccaggtgcacacaggctactcccggctgcccggcaaacccaaggtctacgttcaggacatcctgcaaaagcagctggccaatgaggtactcagcgtgctccacggggagcagggccacctctacatttgcggagatgtgcgcatggctcgggatgtggctaccacattgaagaagctggtggccaccaagctgaacttgagcgaggagcaggtggaagactatttcttccagctcaagagccagaaacgttatcatgaagatatcttcggtgcagtcttttcctatggggcaaaaaagggcagcgccttggaggagcccaaagccacgaggctctga

SEQ ID NO: 124 - protein, 1144 aa, Mus musculus
MACPWKFLFKVKSYQSDLKEEKDINNNVKKTPCAVLSPTIQDDPKSHQNGSPQLLTGTAQNVPESLDKLHVTSTRPQYVRIKNWGSGEILHDTLHHKATSDFTCKSKSCLGSIMNPKSLTRGPRDKPTPLEELLPHAIEFINQYYGSFKEAKIEEHLARLEAVTKEIETTGTYQLTLDELIFATKMAWRNAPRCIGRIQWSNLQVFDARNCSTAQEMFQHICRHILYATNNGNIRSAITVFPQRSDGKHDFRLWNSQLIRYAGYQMPDGTIRGDAATLEFTQLCIDLGWKPRYGRFDVLPLVLQADGQDPEVFEIPPDLVLEVTMEHPKYEWFQELGLKWYALPAVANMLLEVGGLEFPACPFNGWYMGTEIGVRDFCDTQRYNILEEVGRRMGLETHTLASLWKDRAVTEINVAVLHSFQKQNVTIMDHHTASESFMKHMQNEYRARGGCPADWIWLVPPVSGSITPVFHQEMLNYVLSPFYYYQIEPWKTHIWQNEKLRPRRREIRFRVLVKVVFFASMLMRKVMASRVRATVLFATETGKSEALARDLATLFSYAFNTKVVCMDQYKASTLEEEQLLLVVTSTFGNGDCPSNGQTLKKSLFMLRELNHTFRYAVFGLGSSMYPQFCAFAHDIDQKLSHLGASQLAPTGEGDELSGQEDAFRSWAVQTFRAACETFDVRSKHHIQIPKRFTSNATWEPQQYRLIQSPEPLDLNRALSSIHAKNVFTMRLKSQQNLQSEKSSRTTLLVQLTFEGSRGPSYLPGEHLGIFPGNQTALVQGILERVVDCPTPHQTVCLEVLDESGSYWVKDKRLPPCSLSQALTYFLDITTPPTQLQLHKLARFATDETDRQRLEALCQPSEYNDWKFSNNPTFLEVLEEFPSLHVPAAFLLSQLPILKPRYYSISSSQDHTPSEVHLTVAVVTYRTRDGQGPLHHGVCSTWIRNLKPQDPVPCFVRSVSGFQLPEDPSQPCILIGPGTGIAPFRSFWQQRLHDSQHKGLKGGRMSLVFGCRHPEEDHLYQEEMQEMVRKRVLFQVHTGYSRLPGKPKVYVQDILQKQLANEVLSVLHGEQGHLYICGDVRMARDVATTLKKLVATKLNLSEEQVEDYFFQLKSQKRYHEDIFGAVFSYGAKKGSALEEPKATRL

SEQ ID NO: 125 - DNA, 10422 bp, Homo sapiens
  CDS (6667)..(10176)
ctgggattgggacacactttctgggcactgctggccagtcccaaaatggaacataaggaagtggttcttctacttcttttatttctgaaatcagcagcacctgagcaaagccatgtggtccaggattgctaccatggtgatggacagagttatcgaggcacgtactccaccactgtcacaggaaggacctgccaagcttggtcatctatgacaccacatcaacataataggaccacagaaaactacccaaatgctggcttgatcatgaactactgcaggaatccagatgctgtggcagctccttattgttatacgagggatcccggtgtcaggtgggagtactgcaacctgacgcaatgctcagacgcagaagggactgccgtcgcgcctccgactgttaccccggttccaagcctagaggctccttccgaacaagtgcatcctgcctgggagcaagttttccagggcagctttgagaagtcttggagaaacaaacctactaaacctgacagacagtaatactatttgcacaatgcttttctgtgggaaaggtagagccttttcactacgtattgagtacatagagtgtgagggttgacctggaacggctatcctcctggatgacgtgcgttttctgaagaactacatgttcgttgcaactcccacattagaatatgaagtcctaccgagagagatacggagactagacagatacagatgcatttgcatgtgaatacacaatcccacaatacagacgtcaaaacccataccagttattccagagagatggattgggcagaaggcagaaggagaatactctgatcgtttttcggccacgtgtgtgtgttatctcagtgtttctaagaagcgtttgctactttagattttttatttaaaaaaaatagtaataatctattaagtatgagagatgtgcagagaggattagtgatcgagagccatttttgctggtggcaatcatatggtacttttaatgggaatattagaaaggcaccggtaatgaccttgttgcagcacaaaggagagagtgtggggtgcccctgcatgttgtcccacctcttgtgacgtgtatcgttttagaatttccagtggcttgatcatgaactactgcaggaatccagatgctgtggcagctccttattgttatacgagggatcccggtgtcaggtgggagtactgcaacctgacgcaatgctcagacgcagaagggactgccgtcgcgcctccgactgttaccccggttccaagcctagaggctccttccgaacaaggtaaggagtctgtggccagacatctacacgcttcgatgctgggatgaaaagccatggaaattcccactgatgcagccgccttcaatggtaaacggatgctcgagtgttgcctgagttctaccatgtaggaggaagcctccgtgcactctctgggggagccagcggagtgatttctggtgcaacgtggttgggctttgtctttaggatgggcacaaaccctccagggggatcgacttcaaaattcaccttgttgtaaaacgggctacctcagtgtcccagccaaaatttttattgtaacatgctgtcaggtgtgtcactctttccaagccagtaagcttttccggggatttcttcaagtagccagcattcagagcaatcttcagcattgcagattctgagaaatgtggctctggagcctgtcaccctcgagaaacctaagagggctgcattgattccatgtggccctgggtctatggagcagtacatgagctcccagtgctctaaggctcttcagccctaggctttgaagggagtgatttctcagtattcttaaacctctttctgatgacacttgtacctgtgaggggtctagagagaaagagtagtagactcctactttactacaattcaggatgcagggcatgagaggattccctctctcctccaagggaagaagcttttggcgtgcacacatccctgagaagcaaagtgtctttgtcttcagtcagatacataggaccgttttctgccccatggcccggaagccaaaggccttggctttcatgatcaacggtctagggaaacatgcaaaatttccatgtctgtcccaaactctgcccccgacagccaattaccacctgcagcccgcattgccaaatgcggtgccgtttgcatgaagattcagtagagtttcctagaaaggtgctacctcgtgagctcactttccaatgaggaatctgatctggtgtgtttctctaaggtgtcaggtgaaatatttccaagaacttactacagttctagaatgggaggaatctgctgctttggtgtttgtttgttggtcggttttctcacatccatctgcctatggataaggaaaagagaacggtcgtaattctcatagactcctttctggttgtgtcacaaatggcttcacatgtttctctatgctcagagatactcagcttgatttcccgtgttttcatttcagcaccgactgagcaaaggcctggggtgcaggagtgctaccatggtaatggacagagttatcgaggcacatactccaccactgtcacaggaagaacctgccaagcttggtcatctatgacaccacactcgcatagtcggaccccagaatactacccaaatgcgtatgtctttgttctttaccataagagaagaaagggccaagtgaagtttctgttacaagagatgtgtctcaagctgagttctccgaactcaacttgtgacagatgcagatggcgtagcaaaatgtctcaggatgattgccttggagctaagggtctgagagaagggaaatgttaagctccctctccttcctcctacttctattgagcagaagggaaatctggaggtgaggagatcaccttctgaagaaagtcagaatgacaaaggaccagacacttagattacccttccacaacaccaactaaacgtcaatggagactttccagtctggaacttccgttacttctggccttccaccttccctgaagggaaggttgcgtttgccttttctctctgggttcaagaggaaagaataggtgcttatttatggacaggtgaattgatctgtttctatatctacgtatattccgattgtcagaaaaacactcgttcctaagtaccagtggcctgaagggatacaggttcccagcaagagaagatccaaggaaggaaggcagatgagagtcagcacagagagggatgctgaaaagtaaaagggatgggtggatggagagaagcccgggtctgaccacccaatggccaatattttggccacaagcgactaccagagacatggaaaaatggtttctacatgtgggacaacagatggtagaggacctagagaattgagagaggggcaatgatgggctccactccgcagatgccttggctttcttcctggatacccttcctgcactgaatagcaaggagatggagcccaagcagactgtagccatcttgctgaatggaggagagggattggagtttgggatgactgtggtagctgaaatttttctaggtctgctagaaataagaactggtttgtggaggaaaagagctctacaaatacgcatagaagtctcctccagtcgttggcctgacatgacgctgcctgtgcacaggaaatggttccacgagaaagtgtggcaaagaacatttactgagaaacagcaagtacaagagcacaggaagctcaataaagaagagagagatcacatagcactctgggatactggagttcttcccagctagaccagagagtcctcacggagcacattgccaattcagtggagaccccagaacagccgtaatttaaaggtacacttagtatattactagaataaagtcagctgcagacaaccccttgcacagctggaaagcaagtgtccaagcatcaaatcggtttccaatcaatgaagtgcctgtgagaggaaatctcaactctctttagaagtaaacaacaaagtcgattgcctcagctatgcggtatccgcagagtgagtcctaaatttaaaatctgactacatgtagaaaagcgtttcgtgtgacccatgaccaggaaataaatcgggtaatacaaacaggctcaggaatgagagaaatgattagaattgcgtgaaaatttgaaatatcagtatgataactgatttcaaatatttaaaaaaacaacatgcaagaaagcagatatcatatcaagagaaattaacagtacagaatagccaaattaaattaaagagctagtataaaaaaagtatgtcttaattgaaaaaaattactgtatggccggctgatcaatttagacgtttcagaggaaaacattacccaacacacaattctagagaacctacagaatgagctacacacacacacacacacacacacacaaactgaaaacacacccatactcacacacacgcagaaactcacaagttctaacacacacagacacgcgcacccctgaagaaacagtgaaatataaaattaagcgagcctcacagacatgtaggaaaatatgaaaagatttcctgcatgtgggaagcaagtcacagtaaagagcaagggagtttggaatagaaacaaataccagaatcaaggatggctgataacttttcaattacgaagaacattaaaaaaaatcacagaatcgtgaaactcaagggatcacatagggaatttcggaaaaaaaacccaacctgtatgatgtacttttgtacatcacagttcgaaggtaacaaggcaaagatataataagaagaaacctgtcacgagaaactggaggaaaaagagctgtgtcttcctacaagtacactgatacaaattgccaatgtgttcacctcagaaacactggaagccagataccagggaatattgttaaaatgataatcaggaacaaaaagagatcaaccgggaatgctgaatccagcaataaaatgccttgaagatcatccatgtcggataaatgcatattgtgcactgccccaaagaaagaaaccggaaactgtaagaattggaaatcagcaggcttatgtaacaagagaggtgacccgaaggaattaggtagaagaagaattaacaagaaaggaactttctgcagcccacgtaatgaagaatccagcaattggcaaatgtagatagatgtaaatgcaaaatattttcttgatcaaatttctatatctttgtaaatgagagttgactacttgaaacaaaatgatagcaagatatttaacttcagcatatgtagaggtaagaatttgaaatggtagcataaatcacgaagggattaattcgaagtgtaccgttgtaagtttctttacctcatgcacgatggtgtgtcatattaataaaagggtactgtgcgggttcgaagggatattgcaaatcctagagcaatcacaaaggtttgaactctgaggtttttggtataataagaatagtccatgcattcaaaagagggaagccaaggaagaactagaagtctttcaagagctcaggctcttatacatccagttgctcattgaaccagcttcctggaatggagggtctggggttgagactaggccacaagtctagagtctctagagagacagtgttggaaccccatggcccataatacatttcccattttctcaggcagccagaggtcatgaatgtgaggatactgggaggttggagcaacgttcttgggaggcataaggaagagcgaatgcttcaagatccccgcagcccaaactactcgcctgctttgccccctaatgcatttttctctgctgctccgtagctgtccgacctcttcagatctcttagtccaccctgccgtcttcctttatgccatgggtcccactgttctttcaactcatccccctttccctcagtcccggagtagctgcggccagcagagggtagactgagagcaggagagaaggacctgcctaggaaccccttctagagatactgcatcctgcctgggagcaagttttccagggcagctttgagaagtcttggagaaacaaacctactaaacctgacagacagtaatactatttgcacaatgcttttctgtgggaaaggtagagccttttcactacgtattgagtacatagagtgtgagggttgacctggaacggctatcctcctggatgacgtgtgttttctgaagaactacatgttcgttgcaactcccacattagaatatgaagtcctaccgagagagatacggagactagacagatacagatgcatttgcatgtgaatacacaatcccacaatacagacgtcaaaacccataccagttattccagagagatggattgggcagaaggcagaaggagaatactctgatcgtttttcggccacgtgtgtgtgttatctcagtgtttctaagaagcgtttgctactttagattttttatttaaaaaaaatagtaataatctattaagtatgagagatgtgcagagaggattagtgatcgagagccatttttgctggtggcaatcatatggtacttttaatgggaatattagaaaggcaccggtaatgaccttgttgcagcacaaaggagagagtgtggggtgcccctgcatgttgtcccacctcttgtgacgtgtatcgttttggaatttccagtggcttgatcatgaactactgcaggaatccagatgctgtggcagctccttattgttatacgagggatcccggtgtcaggtgggagtactgcaacctgacgcaatgctcagacgcagaagggactgccgtcgcgcctccgactgttaccccggttccaagcctagaggctccttccgaacaagcaccaactgagcaaaggcctggggtgcaggagtgctaccacggaaatggacagagttatcaaggcacatacttcattactgtcacaggaagaacctgccaagcttggtcatctatgacaccacactcgcatagtcggaccccagcatactacccaaatgctggcttgatcaagaactactgccgaaatccagatcctgtggcagccccttggtgttatacaacagatcccagtgtcaggtgggagtactgcaacctgacacgatgctcagatgcagaatggactgccttcgtccctccgaatgttattctggctccaagcctagaggctttttttgaacaagcactgactgaggaaacccccggggtacaggactgctactaccattatggacagagttaccgaggcacatactccaccactgtcacaggaagaacttgccaagcttggtcatctatgacaccacaccagcatagtcggaccccagaaaactacccaaatgctggcctgaccaggaactactgcaggaatccagatgctgagattcgcccttggtgttacaccatggatcccagtgtcaggtgggagtactgcaacctgacacaatgcctggtgacagaatcaagtgtccttgcaactctcacggtggtcccagatccaagcacagaggcttcttctgaagaagcaccaacggagcaaagccccggggtccaggattgctaccatggtgatggacagagttatcgaggctcattctctaccactgtcacaggaaggacatgtcagtcttggtcctctatgacaccacactggcatcagaggacaacagaatattatccaaatggtggcctgaccaggaactactgcaggaatccagatgctgagattagtccttggtgttataccatggatcccaatgtcagatgggagtactgcaacctgacacaatgtccagtgacagaatcaagtgtccttgcgacgtccacggctgtttctgaacaagcaccaacggagcaaagccccacagtccaggactgctaccatggtgatggacagagttatcgaggctcattctccaccactgttacaggaaggacatgtcagtcttggtcctctatgacaccacactggcatcagagaaccacagaatactacccaaatggtggcctgaccaggaactactgcaggaatccagatgctgagattcgcccttggtgttataccatggatcccagtgtcagatgggagtactgcaacctgacgcaatgtccagtgatggaatcaactctcctcacaactcccacggtggtcccagttccaagcacagagcttccttctgaagaagcaccaactgaaaacagcactggggtccaggactgctaccgaggtgatggacagagttatcgaggcacactctccaccactatcacaggaagaacatgtcagtcttggtcgtctatgacaccacattggcatcggaggatcccattatactatccaaatgctggcctgaccaggaactactgcaggaatccagatgctgagattcgcccttggtgttacaccatggatcccagtgtcaggtgggagtactgcaacctgacacgatgtccagtgacagaatcgagtgtcctcacaactcccacagtggccccggttccaagcacagaggctccttctgaacaagcaccacctgagaaaagccctgtggtccaggattgctaccatggtgatggacggagttatcgaggcatatcctccaccactgtcacaggaaggacctgtcaatcttggtcatctatgataccacactggcatcagaggaccccagaaaactacccaaatgctggcctgaccgagaactactgcaggaatccagattctgggaaacaaccctggtgttacacaaccgatccgtgtgtgaggtgggagtactgcaatctgacacaatgctcagaaacagaatcaggtgtcctagagactcccactgttgttccagttccaagcatggaggctcattctgaagcagcaccaactgagcaaacccctgtggtccggcagtgctaccatggtaatggccagagttatcgaggcacattctccaccactgtcacaggaaggacatgtcaatcttggtcatccatgacaccacaccggcatcagaggaccccagaaaactacccaaatgatggcctgacaatgaactactgcaggaatccagatgccgatacaggcccttggtgttttaccatggaccccagcatcaggtgggagtactgcaacctgacgcgatgctcagacacagaagggactgtggtcgctcctccgactgtcatccaggttccaagcctagggcctccttctgaacaagactgtatgtttgggaatgggaaaggataccggggcaagaaggcaaccactgttactgggacgccatgccaggaatgggctgcccaggagccccatagacacagcacgttcattccagggacaaataaatgggcaggtctggaaaaaaattactgccgtaaccctgatggtgacatcaatggtccctggtgctacacaatgaatccaagaaaactttttgactactgtgatatccctctctgtgcatcctcttcatttgattgtgggaagcctcaagtggagccgaagaaatgtcctggaagcattgtaggggggtgtgtggcccacccacattcctggccctggcaagtcagtctcagaacaaggtttggaaagcacttctgtggaggcaccttaatatccccagagtgggtgctgactgctgctcactgcttgaagaagtcctcaaggccttcatcctacaaggtcatcctgggtgcacaccaagaagtgaacctcgaatctcatgttcaggaaatagaagtgtctaggctgttcttggagcccacacaagcagatattgccttgctaaagctaagcaggcctgccgtcatcactgacaaagtaatgccagcttgtctgccatccccagactacatggtcaccgccaggactgaatgttacatcactggctggggagaaacccaaggtacctttgggactggccttctcaaggaagcccagctccttgttattgagaatgaagtgtgcaatcactataagtatatttgtgctgagcatttggccagaggcactgacagttgccagggtgacagtggagggcctctggtttgcttcgagaaggacaaatacattttacaaggagtcacttcttggggtcttggctgtgcacgccccaataagcctggtgtctatgctcgtgtttcaaggtttgttacttggattgagggaatgatgagaaataattaattggacgggagacagagtgaagcatcaacctacttagaagctgaaacgtgggtaaggatttagcatgctggaaataatagacagcaatcaaacgaagacactgttcccagctaccagctatgccaaaccttggcatttttggtatttttgtgtataagcttttaaggtctgactgacaaattctgtattaaggtgtcatagctatgacatttgttaaaaataaactctgcacttattttgatttga

SEQ ID NO: 126 - protein, 1169 aa, Homo sapiens
MNYCRNPDAVAAPYCYTRDPGVRWEYCNLTQCSDAEGTAVAPPTVTPVPSLEAPSEQAPTEQRPGVQECYHGNGQSYQGTYFITVTGRTCQAWSSMTPHSHSRTPAYYPNAGLIKNYCRNPDPVAAPWCYTTDPSVRWEYCNLTRCSDAEWTAFVPPNVILAPSLEAFFEQALTEETPGVQDCYYHYGQSYRGTYSTTVTGRTCQAWSSMTPHQHSRTPENYPNAGLTRNYCRNPDAEIRPWCYTMDPSVRWEYCNLTQCLVTESSVLATLTVVPDPSTEASSEEAPTEQSPGVQDCYHGDGQSYRGSFSTTVTGRTCQSWSSMTPHWHQRTTEYYPNGGLTRNYCRNPDAEISPWCYTMDPNVRWEYCNLTQCPVTESSVLATSTAVSEQAPTEQSPTVQDCYHGDGQSYRGSFSTTVTGRTCQSWSSMTPHWHQRTTEYYPNGGLTRNYCRNPDAEIRPWCYTMDPSVRWEYCNLTQCPVMESTLLTTPTVVPVPSTELPSEEAPTENSTGVQDCYRGDGQSYRGTLSTTITGRTCQSWSSMTPHWHRRIPLYYPNAGLTRNYCRNPDAEIRPWCYTMDPSVRWEYCNLTRCPVTESSVLTTPTVAPVPSTEAPSEQAPPEKSPVVQDCYHGDGRSYRGISSTTVTGRTCQSWSSMIPHWHQRTPENYPNAGLTENYCRNPDSGKQPWCYTTDPCVRWEYCNLTQCSETESGVLETPTVVPVPSMEAHSEAAPTEQTPVVRQCYHGNGQSYRGTFSTTVTGRTCQSWSSMTPHRHQRTPENYPNDGLTMNYCRNPDADTGPWCFTMDPSIRWEYCNLTRCSDTEGTVVAPPTVIQVPSLGPPSEQDCMFGNGKGYRGKKATTVTGTPCQEWAAQEPHRHSTFIPGTNKWAGLEKNYCRNPDGDINGPWCYTMNPRKLFDYCDIPLCASSSFDCGKPQVEPKKCPGSIVGGCVAHPHSWPWQVSLRTRFGKHFCGGTLISPEWVLTAAHCLKKSSRPSSYKVILGAHQEVNLESHVQEIEVSRLFLEPTQADIALLKLSRPAVITDKVMPACLPSPDYMVTARTECYITGWGETQGTFGTGLLKEAQLLVIENEVCNHYKYICAEHLARGTDSCQGDSGGPLVCFEKDKYILQGVTSWGLGCARPNKPGVYARVSRFVTWIEGMMRNN

SEQ ID NO: 127 - DNA, 14070 bp, Homo sapiens
  CDS (79)..(13770)
gaggagcccgcccagccagccagggccgcgaggccgaggccaggccgcagcccaggagccgccccaccgcagctggcgatggacccgccgaggcccgcgctgctggcgctgctggcgctgcctgcgctgctgctgctgctgctggcgggcgccagggccgaagaggaaatgctggaaaatgtcagcctggtctgtccaaaagatgcgacccgattcaagcacctccggaagtacacatacaactatgaggctgagagttccagtggagtccctgggactgctgattcaagaagtgccaccaggatcaactgcaaggttgagctggaggttccccagctctgcagcttcatcctgaagaccagccagtgcatcctgaaagaggtgtatggcttcaaccctgagggcaaagccttgctgaagaaaaccaagaactctgaggagtttgctgcagccatgtccaggtatgagctcaagctggccattccagaagggaagcaggttttcctttacccggagaaagatgaacctacttacatcctgaacatcaagaggggcatcatttctgccctcctggttcccccagagacagaagaagccaagcaagtgttgtttctggataccgtgtatggaaactgctccactcactttaccgtcaagacgaggaagggcaatgtggcaacagaaatatccactgaaagagacctggggcagtgtgatcgcttcaagcccatccgcacaggcatcagcccacttgctctcatcaaaggcatgacccgccccttgtcaactctgatcagcagcagccagtcctgtcagtacacactggacgctaagaggaagcatgtggcagaagccatctgcaaggagcaacacctcttcctgcctttctcctacaagaataagtatgggatggtagcacaagtgacacagactttgaaacttgaagacacaccaaagatcaacagccgcttctttggtgaaggtactaagaagatgggcctcgcatttgagagcaccaaatccacatcacctccaaagcaggccgaagctgttttgaagactgtccaggaactgaaaaaactaaccatctctgagcaaaatatccagagagctaatctcttcaataagctggttactgagctgagaggcctcagtgatgaagcagtcacatctctcttgccacagctgattgaggtgtccagccccatcactttacaagccttggttcagtgtggacagcctcagtgctccactcacatcctccagtggctgaaacgtgtgcatgccaacccccttctgatagatgtggtcacctacctggtggccctgatccccgagccctcagcacagcagctgcgagagatcttcaacatggcgagggatcagcgcagccgagccaccttgtatgcgctgagccacgcggtcaacaactatcataagacaaaccctacagggacccaggagctgctggacattgctaattacctgatggaacagattcaagatgactgcactggggatgaagattacacctatttgattctgcgggtcattggaaatatgggccaaaccatggagcagttaactccagaactcaagtcttcaatcctgaaatgtgtccaaagtacaaagccatcactgatgatccagaaagctgccatccaggctctgcggaaaatggagcctaaagacaaggaccaggaggttcttcttcagactttccttgatgatgcttctccgggagataagcgactggctgcctatcttatgttgatgaggagtccttcacaggcagatattaacaaaattgtccaaattctaccatgggaacagaatgagcaagtgaagaactttgtggcttcccatattgccaatatcttgaactcagaagaattggatatccaagatctgaaaaagttagtgaaagaagttctgaaagaatctcaacttccaactgtcatggacttcagaaaattctctcggaactatcaactctacaaatctgtttctattccatcacttgacccagcctcagccaaaatagaagggaatcttatatttgatccaaataactaccttcctaaagaaagcatgctgaaaactaccctcactgcctttggatttgcttcagctgacctcatcgagattggcttggaaggaaaaggctttgagccaacattggaagctctttttgggaagcaaggatttttcccagacagtgtcaacaaagctttgtactgggttaatggtcaagttcctgatggtgtctctaaggtcttagtggaccactttggctataccaaagatgataaacatgagcaggatatggtaaatggaataatgctcagtgttgagaagctgattaaagatttgaaatccaaagaagtcccggaagccagagcctacctccgcatcttgggagaggagcttggttttgccagtctccatgacctccagctcctgggaaagctgcttctgatgggtgcccgcactctgcaggggatcccccagatgattggagaggtcatcaggaagggctcaaagaatgacttttttcttcactacatcttcatggagaatgcctttgaactccccactggagctggattacagttgcaaatatcttcatctggagtcattgctcccggagccaaggctggagtaaaactggaagtagccaacatgcaggctgaactggtggcaaaaccctccgtgtctgtggagtttgtgacaaatatgggcatcatcattccggacttcgctaggagtggggtccagatgaacaccaacttcttccacgagtcgggtctggaggctcatgttgccctaaaacctgggaagctgaagtttatcattccttccccaaagagaccagtcaagctgctcagtggaggcaacacattacatttggtctctaccaccaaaacggaggtgatcccacctctcattgagaacaggcagtcctggtcagtttgcaagcaagtctttcctggcctgaattactgcacctcaggcgcttactccaacgccagctccacagactccgcctcctactatccgctgaccggggacaccagattagagctggaactgaggcctacaggagagattgagcagtattctgtcagcgcaacctatgagctccagagagaggacagagccttggtggataccctgaagtttgtaactcaagcagaaggtgcgaagcagactgaggctaccatgacattcaaatataatcggcagagtatgaccttgtccagtgaagtccaaattccggattttgatgttgacctcggaacaatcctcagagttaatgatgaatctactgagggcaaaacgtcttacagactcaccctggacattcagaacaagaaaattactgaggtcgccctcatgggccacctaagttgtgacacaaaggaagaaagaaaaatcaagggtgttatttccataccccgtttgcaagcagaagccagaagtgagatcctcgcccactggtcgcctgccaaactgcttctccaaatggactcatctgctacagcttatggctccacagtttccaagagggtggcatggcattatgatgaagagaagattgaatttgaatggaacacaggcaccaatgtagataccaaaaaaatgacttccaatttccctgtggatctctccgattatcctaagagcttgcatatgtatgctaatagactcctggatcacagagtccctcaaacagacatgactttccggcacgtgggttccaaattaatagttgcaatgagctcatggcttcagaaggcatctgggagtcttccttatacccagactttgcaagaccacctcaatagcctgaaggagttcaacctccagaacatgggattgccagacttccacatcccagaaaacctcttcttaaaaagcgatggccgggtcaaatataccttgaacaagaacagtttgaaaattgagattcctttgccttttggtggcaaatcctccagagatctaaagatgttagagactgttaggacaccagccctccacttcaagtctgtgggattccatctgccatctcgagagttccaagtccctacttttaccattcccaagttgtatcaactgcaagtgcctctcctgggtgttctagacctctccacgaatgtctacagcaacttgtacaactggtccgcctcctacagtggtggcaacaccagcacagaccatttcagccttcgggctcgttaccacatgaaggctgactctgtggttgacctgctttcctacaatgtgcaaggatctggagaaacaacatatgaccacaagaatacgttcacactatcatgtgatgggtctctacgccacaaatttctagattcgaatatcaaattcagtcatgtagaaaaacttggaaacaacccagtctcaaaaggtttactaatattcgatgcatctagttcctggggaccacagatgtctgcttcagttcatttggactccaaaaagaaacagcatttgtttgtcaaagaagtcaagattgatgggcagttcagagtctcttcgttctatgctaaaggcacatatggcctgtcttgtcagagggatcctaacactggccggctcaatggagagtccaacctgaggtttaactcctcctacctccaaggcaccaaccagataacaggaagatatgaagatggaaccctctccctcacctccacctctgatctgcaaagtggcatcattaaaaatactgcttccctaaagtatgagaactacgagctgactttaaaatctgacaccaatgggaagtataagaactttgccacttctaacaagatggatatgaccttctctaagcaaaatgcactgctgcgttctgaatatcaggctgattacgagtcattgaggttcttcagcctgctttctggatcactaaattcccatggtcttgagttaaatgctgacatcttaggcactgacaaaattaatagtggtgctcacaaggcgacactaaggattggccaagatggaatatctaccagtgcaacgaccaacttgaagtgtagtctcctggtgctggagaatgagctgaatgcagagcttggcctctctggggcatctatgaaattaacaacaaatggccgcttcagggaacacaatgcaaaattcagtctggatgggaaagccgccctcacagagctatcactgggaagtgcttatcaggccatgattctgggtgtcgacagcaaaaacattttcaacttcaaggtcagtcaagaaggacttaagctctcaaatgacatgatgggctcatatgctgaaatgaaatttgaccacacaaacagtctgaacattgcaggcttatcactggacttctcttcaaaacttgacaacatttacagctctgacaagttttataagcaaactgttaatttacagctacagccctattctctggtaactactttaaacagtgacctgaaatacaatgctctggatctcaccaacaatgggaaactacggctagaacccctgaagctgcatgtggctggtaacctaaaaggagcctaccaaaataatgaaataaaacacatctatgccatctcttctgctgccttatcagcaagctataaagcagacactgttgctaaggttcagggtgtggagtttagccatcggctcaacacagacatcgctgggctggcttcagccattgacatgagcacaaactataattcagactcactgcatttcagcaatgtcttccgttctgtaatggccccgtttaccatgaccatcgatgcacatacaaatggcaatgggaaactcgctctctggggagaacatactgggcagctgtatagcaaattcctgttgaaagcagaacctctggcatttactttctctcatgattacaaaggctccacaagtcatcatctcgtgtctaggaaaagcatcagtgcagctcttgaacacaaagtcagtgccctgcttactccagctgagcagacaggcacctggaaactcaagacccaatttaacaacaatgaatacagccaggacttggatgcttacaacactaaagataaaattggcgtggagcttactggacgaactctggctgacctaactctactagactccccaattaaagtgccacttttactcagtgagcccatcaatatcattgatgctttagagatgagagatgccgttgagaagccccaagaatttacaattgttgcttttgtaaagtatgataaaaaccaagatgttcactccattaacctcccattttttgagaccttgcaagaatattttgagaggaatcgacaaaccattatagttgtactggaaaacgtacagagaaacctgaagcacatcaatattgatcaatttgtaagaaaatacagagcagccctgggaaaactcccacagcaagctaatgattatctgaattcattcaattgggagagacaagtttcacatgccaaggagaaactgactgctctcacaaaaaagtatagaattacagaaaatgatatacaaattgcattagatgatgccaaaatcaactttaatgaaaaactatctcaactgcagacatatatgatacaatttgatcagtatattaaagatagttatgatttacatgatttgaaaatagctattgctaatattattgatgaaatcattgaaaaattaaaaagtcttgatgagcactatcatatccgtgtaaatttagtaaaaacaatccatgatctacatttgtttattgaaaatattgattttaacaaaagtggaagtagtactgcatcctggattcaaaatgtggatactaagtaccaaatcagaatccagatacaagaaaaactgcagcagcttaagagacacatacagaatatagacatccagcacctagctggaaagttaaaacaacacattgaggctattgatgttagagtgcttttagatcaattgggaactacaatttcatttgaaagaataaatgatgttcttgagcatgtcaaacactttgttataaatcttattggggattttgaagtagctgagaaaatcaatgccttcagagccaaagtccatgagttaatcgagaggtatgaagtagaccaacaaatccaggttttaatggataaattagtagagttggcccaccaatacaagttgaaggagactattcagaagctaagcaatgtcctacaacaagttaagataaaagattactttgagaaattggttggatttattgatgatgctgtcaagaagcttaatgaattatcttttaaaacattcattgaagatgttaacaaattccttgacatgttgataaagaaattaaagtcatttgattaccaccagtttgtagatgaaaccaatgacaaaatccgtgaggtgactcagagactcaatggtgaaattcaggctctggaactaccacaaaaagctgaagcattaaaactgtttttagaggaaaccaaggccacagttgcagtgtatctggaaagcctacaggacaccaaaataaccttaatcatcaattggttacaggaggctttaagttcagcatctttggctcacatgaaggccaaattccgagagactctagaagatacacgagaccgaatgtatcaaatggacattcagcaggaacttcaacgatacctgtctctggtaggccaggtttatagcacacttgtcacctacatttctgattggtggactcttgctgctaagaaccttactgactttgcagagcaatattctatccaagattgggctaaacgtatgaaagcattggtagagcaagggttcactgttcctgaaatcaagaccatccttgggaccatgcctgcctttgaagtcagtcttcaggctcttcagaaagctaccttccagacacctgattttatagtccccctaacagatttgaggattccatcagttcagataaacttcaaagacttaaaaaatataaaaatcccatccaggttttccacaccagaatttaccatccttaacaccttccacattccttcctttacaattgactttgtagaaatgaaagtaaagatcatcagaaccattgaccagatgctgaacagtgagctgcagtggcccgttccagatatatatctcagggatctgaaggtggaggacattcctctagcgagaatcaccctgccagacttccgtttaccagaaatcgcaattccagaattcataatcccaactctcaaccttaatgattttcaagttcctgaccttcacataccagaattccagcttccccacatctcacacacaattgaagtacctacttttggcaagctatacagtattctgaaaatccaatctcctcttttcacattagatgcaaatgctgacatagggaatggaaccacctcagcaaacgaagcaggtatcgcagcttccatcactgccaaaggagagtccaaattagaagttctcaattttgattttcaagcaaatgcacaactctcaaaccctaagattaatccgctggctctgaaggagtcagtgaagttctccagcaagtacctgagaacggagcatgggagtgaaatgctgttttttggaaatgctattgagggaaaatcaaacacagtggcaagtttacacacagaaaaaaatacactggagcttagtaatggagtgattgtcaagataaacaatcagcttaccctggatagcaacactaaatacttccacaaattgaacatccccaaactggacttctctagtcaggctgacctgcgcaacgagatcaagacactgttgaaagctggccacatagcatggacttcttctggaaaagggtcatggaaatgggcctgccccagattctcagatgagggaacacatgaatcacaaattagtttcaccatagaaggacccctcacttcctttggactgtccaataagatcaatagcaaacacctaagagtaaaccaaaacttggtttatgaatctggctccctcaacttttctaaacttgaaattcaatcacaagtcgattcccagcatgtgggccacagtgttctaactgctaaaggcatggcactgtttggagaagggaaggcagagtttactgggaggcatgatgctcatttaaatggaaaggttattggaactttgaaaaattctcttttcttttcagcccagccatttgagatcacggcatccacaaacaatgaagggaatttgaaagttcgttttccattaaggttaacagggaagatagacttcctgaataactatgcactgtttctgagtcccagtgcccagcaagcaagttggcaagtaagtgctaggttcaatcagtataagtacaaccaaaatttctctgctggaaacaacgagaacattatggaggcccatgtaggaataaatggagaagcaaatctggatttcttaaacattcctttaacaattcctgaaatgcgtctaccttacacaataatcacaactcctccactgaaagatttctctctatgggaaaaaacaggcttgaaggaattcttgaaaacgacaaagcaatcatttgatttaagtgtaaaagctcagtataagaaaaacaaacacaggcattccatcacaaatcctttggctgtgctttgtgagtttatcagtcagagcatcaaatcctttgacaggcattttgaaaaaaacagaaacaatgcattagattttgtcaccaaatcctataatgaaacaaaaattaagtttgataagtacaaagctgaaaaatctcacgacgagctccccaggacctttcaaattcctggatacactgttccagttgtcaatgttgaagtgtctccattcaccatagagatgtcggcattcggctatgtgttcccaaaagcagtcagcatgcctagtttctccatcctaggttctgacgtccgtgtgccttcatacacattaatcctgccatcattagagctgccagtccttcatgtccctagaaatctcaagctttctcttccagatttcaaggaattgtgtaccataagccatatttttattcctgccatgggcaatattacctatgatttctcctttaaatcaagtgtcatcacactgaataccaatgctgaactttttaaccagtcagatattgttgctcatctcctttcttcatcttcatctgtcattgatgcactgcagtacaaattagagggcaccacaagattgacaagaaaaaggggattgaagttagccacagctctgtctctgagcaacaaatttgtggagggtagtcataacagtactgtgagcttaaccacgaaaaatatggaagtgtcagtggcaacaaccacaaaagcccaaattccaattttgagaatgaatttcaagcaagaacttaatggaaataccaagtcaaaacctactgtctcttcctccatggaatttaagtatgatttcaattcttcaatgctgtactctaccgctaaaggagcagttgaccacaagcttagcttggaaagcctcacctcttacttttccattgagtcatctaccaaaggagatgtcaagggttcggttctttctcgggaatattcaggaactattgctagtgaggccaacacttacttgaattccaagagcacacggtcttcagtgaagctgcagggcacttccaaaattgatgatatctggaaccttgaagtaaaagaaaattttgctggagaagccacactccaacgcatatattccctctgggagcacagtacgaaaaaccacttacagctagagggcctctttttcaccaacggagaacatacaagcaaagccaccctggaactctctccatggcaaatgtcagctcttgttcaggtccatgcaagtcagcccagttccttccatgatttccctgaccttggccaggaagtggccctgaatgctaacactaagaaccagaagatcagatggaaaaatgaagtccggattcattctgggtctttccagagccaggtcgagctttccaatgaccaagaaaaggcacaccttgacattgcaggatccttagaaggacacctaaggttcctcaaaaatatcatcctaccagtctatgacaagagcttatgggatttcctaaagctggatgtaaccaccagcattggtaggagacagcatcttcgtgtttcaactgcctttgtgtacaccaaaaaccccaatggctattcattctccatccctgtaaaagttttggctgataaattcattattcctgggctgaaactaaatgatctaaattcagttcttgtcatgcctacgttccatgtcccatttacagatcttcaggttccatcgtgcaaacttgacttcagagaaatacaaatctataagaagctgagaacttcatcatttgccctcaacctaccaacactccccgaggtaaaattccctgaagttgatgtgttaacaaaatattctcaaccagaagactccttgattcccttttttgagataaccgtgcctgaatctcagttaactgtgtcccagttcacgcttccaaaaagtgtttcagatggcattgctgctttggatctaaatgcagtagccaacaagatcgcagactttgagttgcccaccatcatcgtgcctgagcagaccattgagattccctccattaagttctctgtacctgctggaattgccattccttcctttcaagcactgactgcacgctttgaggtagactctcccgtgtataatgccacttggagtgccagtttgaaaaacaaagcagattatgttgaaacagtcctggattccacatgcagctcaaccgtacagttcctagaatatgaacttaatgttttgggaacacacaaaatcgaagatggtacgttagcctctaagactaaaggaacatttgcacaccgtgacttcagtgcagaatatgaagaagatggcaaatatgaaggacttcaggaatgggaaggaaaagcgcacctcaatatcaaaagcccagcgttcaccgatctccatctgcgctaccagaaagacaagaaaggcatctccacctcagcagcctccccagccgtaggcaccgtgggcatggatatggatgaagatgacgacttttctaaatggaacttctactacagccctcagtcctctccagataaaaaactcaccatattcaaaactgagttgagggtccgggaatctgatgaggaaactcagatcaaagttaattgggaagaagaggcagcttctggcttgctaacctctctgaaagacaacgtgcccaaggccacaggggtcctttatgattatgtcaacaagtaccactgggaacacacagggctcaccctgagagaagtgtcttcaaagctgagaagaaatctgcaggaccatgctgagtgggtttatcaaggggccattagggaaattgatgatatcgacgagaggttccagaaaggagccagtgggaccactgggacctaccaagagtggaaggacaaggcccagaatctgtaccaggaactgttgactcaggaaggccaagccagtttccagggactcaaggataacgtgtttgatggcttggtacgagttactcaagaattccatatgaaagtcaagcatctgattgactcactcattgattttctgaacttccccagattccagtttccggggaaacctgggatatacactagggaggaactttgcactatgttcataagggaggtagggacggtactgtcccaggtatattcgaaagtccataatggttcagaaatactgttttcctatttccaagacctagtgattacacttcctttcgagttaaggaaacataaactaatagatgtaatctcgatgtatagggaactgttgaaagatttatcaaaagaagcccaagaggtatttaaagccattcagtctctcaagaccacagaggtgctacgtaatcttcaggaccttttacaattcattttccaactaatagaagataacattaaacagctgaaagagatgaaatttacttatcttattaattatatccaagatgagatcaacacaatcttcaatgattatatcccatatgtttttaaattgttgaaagaaaacctatgccttaatcttcataagttcaatgaatttattcaaaacgagcttcaggaagcttctcaagagttacagcagatccatcaatacattatggcccttcgtgaagaatattttgatccaagtatagttggctggacagtgaaatattatgaacttgaagaaaagatagtcagtctgatcaagaacctgttagttgctcttaaggacttccattctgaatatattgtcagtgcctctaactttacttcccaactctcaagtcaagttgagcaatttctgcacagaaatattcaggaatatcttagcatccttaccgatccagatggaaaagggaaagagaagattgcagagctttctgccactgctcaggaaataattaaaagccaggccattgcgacgaagaaaataatttctgattaccaccagcagtttagatataaactgcaagatttttcagaccaactctctgattactatgaaaaatttattgctgaatccaaaagattgattgacctgtccattcaaaactaccacacatttctgatatacatcacggagttactgaaaaagctgcaatcaaccacagtcatgaacccctacatgaagcttgctccaggagaacttactatcatcctctaattttttaaaagaaatcttcatttattcttcttttccaattgaactttcacatagcacagaaaaaattcaaaatgcctatattgatcaaaccatacagtgagccagccttgcagtaggcagtagactataagcagaagcacatatgaactggacctgcaccaaagctggcaccagggctcggaaggtctctgaactcagaaggatggcattttttgcaagttaaagaaaatcaggatctgagttattttgctaaacttgggggaggaggaacaaataaatggagtctttattgtgtatcat

SEQ ID NO: 128 - protein, 4563 aa, Homo sapiens [sequence omitted]

SEQ ID NO: 129 - DNA, 1156 bp, Homo sapiens
  CDS (61)..(1014)
cgcagcggaggtgaaggacgtccttccccaggagccgactggccaatcacaggcaggaagatgaaggttctgtgggctgcgttgctggtcacattcctggcaggatgccaggccaaggtggagcaagcggtggagacagagccggagcccgagctgcgccagcagaccgagtggcagagcggccagcgctgggaactggcactgggtcgcttttgggattacctgcgctgggtgcagacactgtctgagcaggtgcaggaggagctgctcagctcccaggtcacccaggaactgagggcgctgatggacgagaccatgaaggagttgaaggcctacaaatcggaactggaggaacaactgaccccggtggcggaggagacgcgggcacggctgtccaaggagctgcaggcggcgcaggcccggctgggcgcggacatggaggacgtgtgcggccgcctggtgcagtaccgcggcgaggtgcaggccatgctcggccagagcaccgaggagctgcgggtgcgcctcgcctcccacctgcgcaagctgcgtaagcggctcctccgcgatgccgatgacctgcagaagcgcctggcagtgtaccaggccggggcccgcgagggcgccgagcgcggcctcagcgccatccgcgagcgcctggggcccctggtggaacagggccgcgtgcgggccgccactgtgggctccctggccggccagccgctacaggagcgggcccaggcctggggcgagcggctgcgcgcgcggatggaggagatgggcagccggacccgcgaccgcctggacgaggtgaaggagcaggtggcggaggtgcgcgccaagctggaggagcaggcccagcagatacgcctgcaggccgaggccttccaggcccgcctcaagagctggttcgagcccctggtggaagacatgcagcgccagtgggccgggctggtggagaaggtgcaggctgccgtgggcaccagcgccgcccctgtgcccagcgacaatcactgaacgccgaagcctgcagccatgcgaccccacgccaccccgtgcctcctgcctccgcgcagcctgcagcgggagaccctgtccccgccccagccgtcctcctggggtggaccctagtttaataaagattcaccaagtttcacgc

SEQ ID NO: 130 - protein, 317 aa, Homo sapiens [sequence omitted]

SEQ ID NO: 131 - DNA, 542 bp, Homo sapiens
  CDS (3)..(542)
ctctgggcgacgttgctggcagaggaaatgagaagaagcccagtagcgtgagggctctgtccattgtcctccccatcgccacggagctgggtctctggtctcgggggcagctgtgtgacagagcgtgcctctccctacggtgctcctcgtcttcctttgcctgggggtcttccttctatggaagaactggcggcttaagaacatcaacagcatcaactttgacaaccccgtctatcagaagaccacagaggatgaggtccacatttgccacaaccaggacggctacagctacccctcgagacagatggtcagtctggaggatgacgtggcgtgaacatctgcctggagtcccgcccctgcccagaacccttcctgagacctcgccggccttgttttattcaaagacagagaagaccaaagcattgcctgccagagctttgttttatatatttattcatctgggaggcagaacaggcttcggacagtgcccatgcaatggcttgggttgggattttggtttcttcctttcctgtgaaggataa

SEQ ID NO: 132 - protein, 179 aa, Homo sapiens
LGDVAGRGNEKKPSSVRALSIVLPIATELGLWSRGQLCDRACLSLRCSSSSFAWGSSFYGRTGGLRTSTASTLTTPSIRRPQRMRSTFATTRTATATPRDRWSVWRMTWREHLPGVPPLPRTLPETSPALFYSKTEKTKALPARALFYIFIHLGGRTGFGQCPCNGLGWDFGFFLSCEG

SEQ ID NO: 133 - DNA, 3408 bp, Homo sapiens
  CDS (27)..(2519)
cgagcgctcccaccgagctgcctgccatggggctggggctgctgctcccgctgctgctgctctggactcgggggactcaggggtccgagctggaccccaaagggcagcacgtctgtgtggccagcagcccctctgctgagctgcagtgctgcgcaggctggaggcagaaggatcaagaatgcaccatccccatctgtgaggggccggacgcctgccagaaagacgaggtgtgtgtgaagccgggcctctgtcgatgcaagcctggattctttggggcccactgcagctcccgctgcccgggccagtactggggccccgactgccgtgagagctgcccctgccacccgcacggccagtgcgagccagccacgggcgcgtgccagtgccaggccgaccgctggggagcccgctgcgagttcccgtgcgcctgcggcccccacgggcgctgcgaccccgcgaccggcgtgtgccactgcgaacccggctggtggtcgtccacgtgccgccgcccgtgccagtgcaacaccgcggcggcgcgctgcgagcaggccacgggcgcctgcgtgtgcaagccgggctggtgggggcgccgctgcagcttccgctgcaactgccacggctccccgtgcgagcaggactccggccgctgcgcctgccggccgggctggtggggtcccgaatgccagcagcagtgcgagtgtgtgcggggccgctgcagcgccgcctccggcgagtgcacctgcccgcccggcttccgcggagcgcgctgcgagctgccctgcccggcaggcagccacggggtgcagtgcgcacacagctgtggccgctgcaaacacaatgagccgtgctctccagacacaggcagctgtgagtcctgcgagccgggctggaacgggacccagtgccagcagccctgcctgcctggcacctttggcgagagctgcgaacagcagtgccctcactgccgacatggggaggcctgtgagccagatactggccactgtcagcgctgtgaccctggctggctggggcccaggtgtgaagacccctgccccactggtacctttggggaagactgtggctctacctgccccacctgtgttcaggggtcctgtgatactgtgacaggggactgtgtctgcagtgccggctactgggggcccagctgcaacgcctcctgcccagccggtttccatggaaacaactgctcagttccttgtgaatgcccagagggactctgccaccctgtctctgggtcctgccagccaggctctggcagtcgggacactgccctcatcgtgggcagccttgtgcctctgctgctgctcttcctgggtcttgcctgctgtgcctgctgctgctgggccccccgatcagacctcaaggacaggccagcgagagatggagctaccgtgtccaggatgaagctgcaggtctgggggacactgaccagcttgggctccacgctgccctgccgttccctcagctcccacaagctaccctgggtgacagtctcacatcacgacccggaggtccccttcaaccacagcttcatcgagccgccctctgccggctgggccactgatgactccttctcatccgatcctgagtctggagaggcagatgaggttcctgcctactgtgtgccaccccaagaagggatggtccctgtggcccaggcagggtcgtcagaggccagcctggctgcaggtgctttcccgccccctgaggacgcctccacgccattcgccatcccgcgcacctccagcctagctcgggccaagcggccatcggtctccttcgcggaaggtaccaagtttgcaccacagagtcgccgaagctcaggggagctctccagcccgctccgaaagcccaagaggctctcccggggggcgcagtcgggtcctgagggccgggaagccgaagagtccacaggcccagacgaagcagaagcccccgagtcctttccggcggctgccagtcccggggattcagccactggccaccggcggcccccacttggtagccggacagtggctgagcacgtggaagccattgagggcagcgtccaggagagctcgggccctgtgaccacgatctacatgctggcagggaagccccgcggatccgaaggccctgtccgctctgtcttccgccattttggtagcttccagaaaggccaggcggaagccaaggtcaagagggccatccctaagcctccgcgccaggccctgaatcggaaaaagggcagccctggccttgcctctggctctgtcggccagagccccaactcagccccaaaagctgggcttcctggggccacagggcctatggcagtcagaccagaggaagcggtccgggggctgggggctggcaccgagagttcaaggagagcccaggagccagtctctggctgtggctccccagaacaggatccccagaagcaggctgaagaggaaaggcaggaggaacctgagtatgagaatgttgtacccatctccaggccaccagaaccctgatgaccttgaatttggggagtggggagagtggatggactagactgtgctgtgtgctggaaaatgatcccggggccaggacagacaaaccagagcctctgcgcctccacagggaaaaggcaaggcttccaggccagttggcccaggcccctggcagtgctcccggaggggcccaggaaggcctgggcagagaccctgtaggatggggtcaggaagggttgcctgcagggacttttgctctgctgtcctggaccctgtgtgcctcataagggctattctttctttcacgtgcaaaacatttttctgaaatagcaaacaacctacatgtttgctgataaaagattggctaaacaaaattttttttttttttgagacagaatctccctctgtcccccaggctggagtgcagtggtgcgatctcggctcactgcaagctctgcctcccgggttcacgcccttctcctgcctcagcctcccgagtagctgggactacaggtgccctccaccacgcttggctaatttttttgtatatttaatagagacagggtttcaccatgttagccaggatggtctcgatctcctgacctcgtgatccacctgcctcggcctccccaaagtgctgggatgacaggcatgagccaccacgcctggtctatgaactttttaaaaaggatgtatgtgtataaacagattcaagggaaaggcactaaatggttttttcctctggaagatgagattgtaggtgatatttattttcttctgaaacttttgtatagtttgcaaattttctacagtgaacattcttttttacttttgttactagattgaatttgataaagtataataaaaagcaatgatctttgttaaaaaataaaaagtactaacattacag

SEQ ID NO: 134 - protein, 830 aa, Homo sapiens
MGLGLLLPLLLLWTRGTQGSELDPKGQHVCVASSPSAELQCCAGWRQKDQECTIPICEGPDACQKDEVCVKPGLCRCKPGFFGAHCSSRCPGQYWGPDCRESCPCHPHGQCEPATGACQCQADRWGARCEFPCACGPHGRCDPATGVCHCEPGWWSSTCRRPCQCNTAAARCEQATGACVCKPGWWGRRCSFRCNCHGSPCEQDSGRCACRPGWWGPECQQQCECVRGRCSAASGECTCPPGFRGARCELPCPAGSHGVQCAHSCGRCKHNEPCSPDTGSCESCEPGWNGTQCQQPCLPGTFGESCEQQCPHCRHGEACEPDTGHCQRCDPGWLGPRCEDPCPTGTFGEDCGSTCPTCVQGSCDTVTGDCVCSAGYWGPSCNASCPAGFHGNNCSVPCECPEGLCHPVSGSCQPGSGSRDTALIVGSLVPLLLLFLGLACCACCCWAPRSDLKDRPARDGATVSRMKLQVWGTLTSLGSTLPCRSLSSHKLPWVTVSHHDPEVPFNHSFIEPPSAGWATDDSFSSDPESGEADEVPAYCVPPQEGMVPVAQAGSSEASLAAGAFPPPEDASTPFAIPRTSSLARAKRPSVSFAEGTKFAPQSRRSSGELSSPLRKPKRLSRGAQSGPEGREAEESTGPDEAEAPESFPAAASPGDSATGHRRPPLGSRTVAEHVEAIEGSVQESSGPVTTIYMLAGKPRGSEGPVRSVFRHFGSFQKGQAEAKVKRAIPKPPRQALNRKKGSPGLASGSVGQSPNSAPKAGLPGATGPMAVRPEEAVRGLGAGTESSRRAQEPVSGCGSPEQDPQKQAEEERQEEPEYENVVPISRPPEP

SEQ ID NO: 135 - DNA, 4503 bp, Caenorhabditis elegans
  CDS (1)..(4503)
atgaagttcattggaacttccggttcaattacattgggagcagacatcatatgtcggattggttgtcagttcaattatcaagcatctgcaacctgcaattctgttggggcgtctgtcgcaactgtagtcaccgctgataatcctcgacgttcagtgtctttccctatttattgtgcaagcttagcatatgcaagcagtaaatacaacaatatctcgtcagaaacagtcggaatcgcccatctggaacatagacaatcccttgcgaaagacttcacgtgttccaatgcgagccaagaaacatttggacaaagaagttttgttattcttgctgaaaacacaaaagacactgatgtgatgaaaagttccgtggataacgttttcagaaacaagaatagtatcttctaccagcttagtccttttgtcaactctgctcctccacagcgatatgcaaactttttcgctgttctgaataaatgttccgaaactgcacaaacggagcaaagctctgactatggaacgtttttaacaaaagttatgaatgttactagtaaatcacaacaacgacccaatgatccaagtgatcctgtcaaggtcacaaatttcctgcctcaagcaattgcaggagcgaacgcctattctgacattctgcttgtgattaattataacgtgtctaccattaccgacaacgatgctaccgaaatcaaaagtgcattagaaaaacaaagatctcgactatacattctttttgttcaaacgtatttcaactacactgatacttactatgccatgaacaaactggcgattgcgagtggaggagtggcgattcgagtgaacacttatgatgatttgagcacgttctttgcacaatacttcccacttctcgttgcaaatgacattgtcgcaaaagcatatgctgaaaacccaagacctggagttgcgttgaataatgtcaatctacttgctcaacaatatgttcttcttgtaacaaatgaggattcattgggagatggcccggtgccagcatcggtaactgttaccgggattaatgttacacaactaccaacaattggcgaacttcaattattcactcttattccagaaaaggctggaaaattcactccattgttctattcatcttcatcttttgatgacgggtcaaaaattaccattacatacagtgatgcaacaaacccagcaaatccaatttataatggaaatattacgtctgctttaaatgactgcaaatattatgcaaacacaaaaaattacgcctgggcctgtagtatttccgaaatcgcattattattacaattttcaatgagaaatattcagatcgatagagttttgaacggtgaaacgatttcgagaaccttcccaattacttgccttggagcagatgtaggagactgcctcaacggtggaaatctaacagatgctggttcatgcatttgcccattacagtggacaggaactaactgtcaagctccgcaatgcttgaatggaggtacactgaaaactgatgacacttgtgcatgtctcgatagtttcaaaggagatttttgtgaaacaagtacctctgtttgcgctggagctccgacatctccggactatcgctctgaactgagttcattggtaattgttgctgatgtcaacgcattatcaacaagtagtctaagcaatacggtacccggaataactggagtgccaattactgtcattctatatggcgatggaaatgctccaagaattgttcagtctacaactaacagtgagcatctctccgaggtattaggtgcaccgacgggtaccacaacttcaccaagttcaacggcttcaccagcaccatccgcaagtgatatgtataaggctctgaatttggcacttgacaatcagctcaccgaccgtgcatttgtaattgtatacacatcaaattccaatgtcaccattgatcctgactttttgatccgtttggcagtcagaagagccgaagtacgagtgttgtcaacttcgggaactgaaagtcaaaactctataacattatcgctagtcggaaatggaattcctattgcgataaatggcgcgaaagatttcgaaaattacctgacatactacgttgttcccttattccaatcactacaataccaagtgaacactccacaacgagtgttcaatgtgttccaaacaggtcaattctacaactctacgcaaatttctatcccagcagattccacatttgataacgctaaaccaaatctttttgtgcatgtgtacgaaggtcgcattaattattcagatccttcaacaaatggaaacgaggttggcaattctactatatactttctcccttatgaccccacaaaacctatcaacttaattgtgaataataatggcacgaccggttactacgcaatcgaagtcatcggatatctaaagacatcatatggtttcaatattgataatgctaacggatcaaatgaaaacctgaactcgggagtagtatataaccaacaaaacacattgaatatctattctgcgccgttttcacagcttcctaaaactgatccatcaaacttcccatatctcacacttggagaaattgccagtaacggaacagttttacctgcaacaacagttttgtttacaagaaaaagtggtgcgtcctgtttttacagtcacttcaccgttcttgatgtctgctcccaaagcacaacaattggatatcaggcacagttgaccacaagaacaagcaccttgacaaataggattcaacaatttgtgctgacatgctttaaaacaagttatgcaaataatgatacttcctgccatggacatggatcaccaatggcaacctgtgcctgtaatgctgacttcggaggaattgattgcactgaaccggcttgtgtaaatggaggtgttcgggatgggtcggtttgtcgttgtcctgtaagattctatgggcttcgatgtgaagaatgtgagtctaggcaaaatctgcctataagaaaattatccacacctaattacggacaaattactgacaaattactggtaaagaaattcattcagttcccttttgaatcagaaccagcttcgtctactgtctccgtgataacttcaactactatgctgccttctacgtcaactgttgctccaagcacaagccaatcaacaatagtttccactgttactacacagtcaccaagtccttcaacaacagctccaaaacaagtccgagctgctgcattcattattgactgcatgggaactgatgattatgctttcaatcagacattcaaatcgattgcacagtacttcaagacatttggctatagccattacatcatgttaaccaataatttgaatggaagtttacaattgaacaatggaagtttactatttgaagatttccaacaatattcagatgagagtatgattatgagcaaactacccctgtattggagtttaagagccaccccaagtagaaccgctagcgtcagcaacgcgctcagtaagattcttgcaagttacaatagaaacggtacagagttcaaaaactctgtaagcatgaatattttttatgcaactcaaatagggctgggcgatgaggatccaactgcagcaggcttagaagttttcaacaagagcgcgattgtatattctgcattcgcaaaaaatgccaaccagacaattgtgacttctcttcaaaaattcagtaccgacgtaaccactgctagagattattacagtggtctttctgatatgtatgaaagcactcaaccccagggttcgaatgagctccctccaaaaccggatcaacttagttgtgtgtacggcctgcaatcgaatatcaaaattgcaattgatagatccaactcgtcaaacccagaggttaacacaattatgaataatttccttgtcaatttccgtcttggatttaattatattgaaaatgatgacaacagatgcggggataagttaccagaattttataccggacgaactgcattaacggcgttcccgtattatgatgccattgcaaaaatagcaacattttgtccatctcaatacacttcgatgctatcattccaagtcgtcggaagccaattacagccaaacttcaccgataaatatgtcaaagtcattagcaagaacattaacagtgccgattgttcgtgcaacagattcaacgacactaacactgcgaagtttatcatttggatgcctcgttctgcagcgcccgtcactgatgatgattatttaaccttgctcaaactcaacaccacaaatgcatatcactttgtcgttccattttacgatagtgctgataacagtaccgatttgtactaccagattcttgtgaagcaagcaggacccgaaggtcccgattattattggttaccaaatgcagttaatgctacaaatttgcaaacgaatgtaataaatattctatacgagaagctttgccaaactgccggtgttgacccaacagcaatcccaccataa

SEQ ID NO: 136 - protein, 1500 aa, Caenorhabditis elegans
MKFIGTSGSITLGADIICRIGCQFNYQASATCNSVGASVATVVTADNPRRSVSFPIYCASLAYASSKYNNISSETVGIAHLEHRQSLAKDFTCSNASQETFGQRSFVILAENTKDTDVMKSSVDNVFRNKNSIFYQLSPFVNSAPPQRYANFFAVLNKCSETAQTEQSSDYGTFLTKVMNVTSKSQQRPNDPSDPVKVTNFLPQAIAGANAYSDILLVINYNVSTITDNDATEIKSALEKQRSRLYILFVQTYFNYTDTYYAMNKLAIASGGVAIRVNTYDDLSTFFAQYFPLLVANDIVAKAYAENPRPGVALNNVNLLAQQYVLLVTNEDSLGDGPVPASVTVTGINVTQLPTIGELQLFTLIPEKAGKFTPLFYSSSSFDDGSKITITYSDATNPANPIYNGNITSALNDCKYYANTKNYAWACSISEIALLLQFSMRNIQIDRVLNGETISRTFPITCLGADVGDCLNGGNLTDAGSCICPLQWTGTNCQAPQCLNGGTLKTDDTCACLDSFKGDFCETSTSVCAGAPTSPDYRSELSSLVIVADVNALSTSSLSNTVPGITGVPITVILYGDGNAPRIVQSTTNSEHLSEVLGAPTGTTTSPSSTASPAPSASDMYKALNLALDNQLTDRAFVIVYTSNSNVTIDPDFLIRLAVRRAEVRVLSTSGTESQNSITLSLVGNGIPIAINGAKDFENYLTYYVVPLFQSLQYQVNTPQRVFNVFQTGQFYNSTQISIPADSTFDNAKPNLFVHVYEGRINYSDPSTNGNEVGNSTIYFLPYDPTKPINLIVNNNGTTGYYAIEVIGYLKTSYGFNIDNANGSNENLNSGVVYNQQNTLNIYSAPFSQLPKTDPSNFPYLTLGEIASNGTVLPATTVLFTRKSGASCFYSHFTVLDVCSQSTTIGYQAQLTTRTSTLTNRIQQFVLTCFKTSYANNDTSCHGHGSPMATCACNADFGGIDCTEPACVNGGVRDGSVCRCPVRFYGLRCEECESRQNLPIRKLSTPNYGQITDKLLVKKFIQFPFESEPASSTVSVITSTTMLPSTSTVAPSTSQSTIVSTVTTQSPSPSTTAPKQVRAAAFIIDCMGTDDYAFNQTFKSIAQYFKTFGYSHYIMLTNNLNGSLQLNNGSLLFEDFQQYSDESMIMSKLPLYWSLRATPSRTASVSNALSKILASYNRNGTEFKNSVSMNIFYATQIGLGDEDPTAAGLEVFNKSAIVYSAFAKNANQTIVTSLQKFSTDVTTARDYYSGLSDMYESTQPQGSNELPPKPDQLSCVYGLQSNIKIAIDRSNSSNPEVNTIMNNFLVNFRLGFNYIENDDNRCGDKLPEFYTGRTALTAFPYYDAIAKIATFCPSQYTSMLSFQVVGSQLQPNFTDKYVKVISKNINSADCSCNRFNDTNTAKFIIWMPRSAAPVTDDDYLTLLKLNTTNAYHFVVPFYDSADNSTDLYYQILVKQAGPEGPDYYWLPNAVNATNLQTNVINILYEKLCQTAGVDPTAIPP

SEQ ID NO: 137 - DNA, 369 bp, Homo sapiens
  CDS (89)..(268)
gtattaagctcaatattagcattaatccatttatttgttaaaatctaatattgtattcttgtcttaaacagtgactttgtttttgtaggctgcatcccatatctatcaaaatcaatttgttcaaatgatcctcaattcacttattaacaagtcaaaatcttctatgttccaagtcagaactttgagagaactgttatggggctatagggatccatttttgagtttggttccgtaccctgttactaccacagttggtctgttttatcctgtaagtaccaaatatgaatggcaatattattacattttaatttaattaattcaatggcattggcaaggcataattttataatttagctcattagctatgct

SEQ ID NO: 138 - protein, 60 aa, Homo sapiens
AASHIYQNQFVQMILNSLINKSKSSMFQVRTLRELLWGYRDPFLSLVPYPVTTTVGLFYP

SEQ ID NO: 139 - DNA, 3412 bp, Homo sapiens
  CDS (27)..(2519)
cgagcgctcccaccgagctgcctgccatggggctggggctgctgctcccgctgctgctgctctggactcgggggactcaggggtccgagctggaccccaaagggcagcacgtctgtgtggccagcagcccctctgctgagctgcagtgctgcgcaggctggaggcagaaggatcaagaatgcaccatccccatctgtgaggggccggacgcctgccagaaagacgaggtgtgtgtgaagccgggcctctgtcgatgcaagcctggattctttggggcccactgcagctcccgctgcccgggccagtactggggccccgactgccgtgagagctgcccctgccacccgcacggccagtgcgagccagccacgggcgcgtgccagtgccaggccgaccgctggggagcccgctgcgagttcccgtgcgcctgcggcccccacgggcgctgcgaccccgcgaccggcgtgtgccactgcgaacccggctggtggtcgtccacgtgccgccgcccgtgccagtgcaacaccgcggcggcgcgctgcgagcaggccacgggcgcctgcgtgtgcaagccgggctggtgggggcgccgctgcagcttccgctgcaactgccacggctccccgtgcgagcaggactccggccgctgcgcctgccggccgggctggtggggtcccgaatgccagcagcagtgcgagtgtgtgcggggccgctgcagcgccgcctccggcgagtgcacctgcccgcccggcttccgcggagcgcgctgcgagctgccctgcccggcaggcagccacggggtgcagtgcgcacacagctgtggccgctgcaaacacaatgagccgtgctctccagacacaggcagctgtgagtcctgcgagccgggctggaacgggacccagtgccagcagccctgcctgcctggcacctttggcgagagctgcgaacagcagtgccctcactgccgacatggggaggcctgtgagccagatactggccactgtcagcgctgtgaccctggctggctggggcccaggtgtgaagacccctgccccactggtacctttggggaagactgtggctctacctgccccacctgtgttcaggggtcctgtgatactgtgacaggggactgtgtctgcagtgccggctactgggggcccagctgcaacgcctcctgcccagccggtttccatggaaacaactgctcagttccttgtgaatgcccagagggactctgccaccctgtctctgggtcctgccagccaggctctggcagtcgggacactgccctcatcgcgggcagccttgtgcctctgctgctgctcttcctgggccttgcctgctgtgcctgctgctgctgggccccccgatcagacctcaaggacaggccagcgagagatggagctaccgtgtccaggatgaagctgcaggtctgggggacactgaccagcttgggctccacgctgccctgccgttccctcagctcccacaagctaccctgggtgacagtctcacatcacgacccggaggtccccttcaaccacagcttcatcgagccgccctctgccggctgggccactgatgactccttctcatccgatcctgagtctggagaggcagatgaggttcctgcctactgtgtgccaccccaagaagggatggtccctgtggcccaggcagggtcgtcagaggccagcctggctgcaggtgctttcccgccccctgaggacgcctccacgccattcgccatcccgcgcacctccagcctagctcgggccaagcggccatcggtctccttcgcggaaggtaccaagtttgcaccacagagtcgccgaagctcaggggagctctccagcccgctccgaaagcccaagaggctctcccggggggcgcagtcgggtcctgagggccgggaagccgaagagtccacaggcccagaggaagcagaagcccccgagtcctttccggcggctgccagtcccggggattcagccactggccaccggcggcccccacttggtggccggacagtggctgagcacgtggaagccattgagggcagcgtccaggagagctcgggccctgtgaccacgatctacatgctggcagggaagccccgcggatccgaaggccctgtccgctctgtcttccgccattttggtagcttccagaaaggccaggcggaagccaaggtcaagagggccatccctaagcctccgcgccaggccctgaatcggaaaaagggcagccctggccttgcctctggctctgtcggccagagccccaactcagccccaaaagctgggcttcctggggccacagggcctatggcagtcagaccagaggaagcggtccgggggctgggggctggcaccgagagttcaaggagagcccaggagccagtctctggctgtggctccccagaacaggatccccagaagcaggctgaagaggaaaggcaggaggaacctgagtatgagaatgttgtacccatctccaggccaccagaaccctgatgaccttgaatttggggagtggggagagtggatggactagactgtgctgtgtgctggaaaatgatcccggggccaggacagacaaaccagagcctctgcgcctccacagggaaaaggcaaggcttccaggccagttggcccaggcccctggcagtgctcccggaggggcccaggaaggcctgggcagagaccctgtaggatggggtcaggaagggttgcctgcagggacttttgctctgctgtcctggaccctgtgtgcctcataagggctattctttctttcacgtgcaaaacatttttctgaaatagcaaacaacctacatgtttgctgataaaagattggctaaacaaatttttttttttttttttgagacagaatctccctctgtcccccaggctggagtgcagtggtgcgatctcggctcactgcaagctctgcctcccgggttcacgcccttctcctgcctcagcctcccgagtagctgggactacaggtgccctccaccacgcttggctaatttttttgtatatttaatagagacagggtttcaccatgttagccaggatggtctcgatctcctgacctcgtgatccacctgcctcggcctcccaaagtgctgggatgacaggcatgagccaccacgcctggtctatgaactttttaaaaaggatgtatgtgtataaaaacagattcaagggaaaggcactaaatggttttttcctctggaagatgagattgtaggtgatatttattttcttctgaaacttttgtatagtttgcaaattttctacagtgaacattcttttttacttttgttactagattgaatttgataaagtataataaaaagcaatgatctttgttaaaaaaataaaaagtactaacattacag

SEQ ID NO: 140 - protein, 830 aa, Homo sapiens
MGLGLLLPLLLLWTRGTQGSELDPKGQHVCVASSPSAELQCCAGWRQKDQECTIPICEGPDACQKDEVCVKPGLCRCKPGFFGAHCSSRCPGQYWGPDCRESCPCHPHGQCEPATGACQCQADRWGARCEFPCACGPHGRCDPATGVCHCEPGWWSSTCRRPCQCNTAAARCEQATGACVCKPGWWGRRCSFRCNCHGSPCEQDSGRCACRPGWWGPECQQQCECVRGRCSAASGECTCPPGFRGARCELPCPAGSHGVQCAHSCGRCKHNEPCSPDTGSCESCEPGWNGTQCQQPCLPGTFGESCEQQCPHCRHGEACEPDTGHCQRCDPGWLGPRCEDPCPTGTFGEDCGSTCPTCVQGSCDTVTGDCVCSAGYWGPSCNASCPAGFHGNNCSVPCECPEGLCHPVSGSCQPGSGSRDTALIAGSLVPLLLLFLGLACCACCCWAPRSDLKDRPARDGATVSRMKLQVWGTLTSLGSTLPCRSLSSHKLPWVTVSHHDPEVPFNHSFIEPPSAGWATDDSFSSDPESGEADEVPAYCVPPQEGMVPVAQAGSSEASLAAGAFPPPEDASTPFAIPRTSSLARAKRPSVSFAEGTKFAPQSRRSSGELSSPLRKPKRLSRGAQSGPEGREAEESTGPEEAEAPESFPAAASPGDSATGHRRPPLGGRTVAEHVEAIEGSVQESSGPVTTIYMLAGKPRGSEGPVRSVFRHFGSFQKGQAEAKVKRAIPKPPRQALNRKKGSPGLASGSVGQSPNSAPKAGLPGATGPMAVRPEEAVRGLGAGTESSRRAQEPVSGCGSPEQDPQKQAEEERQEEPEYENVVPISRPPEP

SEQ ID NO: 141 - DNA, 3763 bp, Mus musculus
  CDS (48)..(1139)
gaggtcctcgactgtttcagtttttcactcttagcatgaatttggaaatgacttttgatgacaagatgaagcctgcgaatgacgagcctgatcagaagtcatgtggcaagaagcctaaaggtctgcatttgctttcctccccatggtggttccctgctgctatgactctggtcatcctctgcctggtgttgtcagtgacccttattgtacagtggacacaattacgccaggtatctgacctcttaaaacaataccaagcgaaccttactcagcaggatcgtatcctggaagggcagatgttagcccagcagaaggcagaaaacgcttcacaggaatcaaagaaggaactgaaaggaaagatagacaccctcacccagaagctgaatgagaaatccaaagagcaggaggagcttctacagaagaatcagaacctccaagaagccctgcaaagagctgcaaactcttcagaggagtcccagagagaactcaagggaaagatagacaccatcacccggaagctggacgagaaatccaaagagcaggaggagcttctgcagatgattcagaacctccaagaagccctgcagagagctgcaaactcttcagaggagtcccagagagaactcaagggaaagatagacaccctcaccttgaagctgaacgagaaatccaaagagcaggaggagcttctacagaagaatcagaacctccaagaagccctgcaaagagctgcaaacttttcaggtccttgtccacaagactggctctggcataaagaaaactgttacctcttccatgggccctttagctgggaaaaaaaccggcagacctgccaatctttgggtggccagttactacaaattaatggtgcagatgatttgacattcatcttacaagcaatttcccataccacctccccgttctggattggattgcatcggaagaagcctggccaaccatggctatgggagaatggaactcctttgaattttcaattctttaagaccaggggcgtttctttacagctatattcatcaggcaactgtgcataccttcaagacggagctgtgttcgctgaaaactgcattctaattgcattcagcatatgtcagaagaagacaaatcatttgcaaatttagtgaatctaaagattctggagaagaccatgagaagacttttgactgtcgctctgaaatttaagctattttttattacctgcatgtaaagcatgttggccttgacatctgtcagttacctgatagctacagttcacctcatcaaagacaaggaccagaagcaaatactggtggatccagatgtttgaaatctttgtatcaaaacgtgtgagttcaattgtttatccatatacactggccttgcccctccaaagtctcccaaccaacctgcactccttcttcccctttgtgttttaaatgatgcttcctgcctgacctggccatgctttgtactcagtctcctctacctcagtatgcctcctgttgctgcatgaaagacaggatgtagaaatcctcctcaagtgcaggcagagggctcaaaggcaaagctcgtccgagaaataacatgcaaagaaacagaactggaaaaactacactgcaaacaggaactcatgatctctaaaaagccatggcttgatctttatgacaggagtccatctccagactgcacttttacacacatattttttattttacttttattgtgaagtttatggatagtttgcctacttgaattctgtgtaccacatgagtgcctggtgccactgaagatcagaagaggacatcagattctctggatctggaattccagatggttgtaagctgctatgtagatgtgaagaattgaattcggtgtcccctggaagaacagccagtactctttgccatgagctatctctcaagctcctgtgatcaattcttgtatcagttatgtctccatttttgctctaccaaagaacagtgttataactttaaaacagtaagtattttcattattctaggggtaatatagcagatatagatagagatagagatagagatagagatagagatagagatagagatagagatagagatagagataggtataggtataggtataggtataggtataggtataggtataggtataggtataggtagatagagatagaggtagaggtagaggtagaggtagaggtagaggtagaggtagaggtagagatagagatagagatagagatagagatagagatagagatagagatagagatagagatagagatagagatagagatagagatagagatagagatagagatagagatagagatagatagtgtgtgtgtgcgtgtgtgtgtttctatgctaggtacgatccttgaggagatgagacagttttgtgtgaaatgagtttgtaataatccaaatttaaaaataaattcgatgattacctgtagtggtcatattaccacagccaagatgatgaacatacctgtcacttctgccccttcccaaagcctcctccctaaaacaaacaccaatctgctttcagttcgcattttatagagcttctcattttgtttttaagacagaatctcatatagtcctggctggcctggaactcactacacagagcaggctggcctccaccttctagagctcctcctgccagactcccaaaccttaagactgaaggagtgccctgccgtgtgtgactcaaacaccttaatgtgaatggaacagcataagatgtccaggttttttcagtccagcttcttccacttggtacaatttttaatttttgtgttcatacatctccaccacagtgtttgtatcagttcatcattcttttcaaatgttgagccttcccctgtggatctatagtgtcatttgttatctgtgtatttgttgatgccatttgggttggttttgtctggggtcacctacaaataaagctgctatggatgtccatggacaaggctaatatcttaggtaagcacctacgagtaagatgcttgggtcattcagtgtgggaatatatggttggctattttaaccattcctgtttgaaaacattaattttttttatttttgaaatcaattttttaaaaaattaattagtctattttacatctcaaccccagtttctcttcctcctctcctctcaaccttctcccaccttctctccctgaccccatccacccctcctccctttctctccagaagaggggaggcctcccatggatgccaaccagcctcagcatctcaagttacagtaagaataggtttgtcttctcctgtgaaaatcttaatttttagatttatctattatatatgcagtactttgcttgcacatatgtattggtaccatgtacatgcatggtaccagagaaagtcagaagaggccattgtattttctgggactggaattacagacgtttttgaacaatcctatagactctgggaactgaacccaggtcgtctggaaaggcaagcagtgctcttaacccctgagccatttcttctggccttttagcaatttttattaatatataactgtgtatacttgcacttttagctcgaagttcttaagtgtcaaatagtcttggatttattttcatgttatcactgtctgtacaatttctgtgatgaaataactgagcatatattttgagaatttggttttcttaaattttaaatctgaaggatttacatatttgagaataaaaaccagccagatacataaaaaaaaaaaaaaaaaaaaa

SEQ ID NO: 142 - protein, 363 aa, Mus musculus
MTFDDKMKPANDEPDQKSCGKKPKGLHLLSSPWWFPAAMTLVILCLVLSVTLIVQWTQLRQVSDLLKQYQANLTQQDRILEGQMLAQQKAENASQESKKELKGKIDTLTQKLNEKSKEQEELLQKNQNLQEALQRAANSSEESQRELKGKIDTITRKLDEKSKEQEELLQMIQNLQEALQRAANSSEESQRELKGKIDTLTLKLNEKSKEQEELLQKNQNLQEALQRAANFSGPCPQDWLWHKENCYLFHGPFSWEKNRQTCQSLGGQLLQINGADDLTFILQAISHTTSPFWIGLHRKKPGQPWLWENGTPLNFQFFKTRGVSLQLYSSGNCAYLQDGAVFAENCILIAFSICQKKTNHLQI

SEQ ID NO: 143 - DNA, 1102 bp, Homo sapiens
  CDS (44)..(1102)
gcgtcgacgtcttgccaccgcatctggagaaccagcggttaccatggaggggatcagtatatacacttcagataactacaccgaggaaatgggctcaggggactatgactccatgaaggaaccctgtttccgtgaagaaaatgctaatttcaataaaatcttcctgcccaccatctactccatcatcttcttaactggcattgtgggcaatggattggtcatcctggtcatgggttaccagaagaaactgagaagcatgacggacaagtacaggctgcacctgtcagtggccgacctcctctttgtcatcacgcttcccttctgggcagttgatgccgtggcaaactggtactttgggaacttcctatgcaaggcagtccatgtcatctacacagtcaacctctacagcagtgtcctcatcctggccttcatcagtctggaccgctacctggccattgtccacgccaccaacagtcagaggccaaggaagctgttggctgaaaaggtggtctatgttggcgtctggatccctgccctcctgctgactattcccgacttcatctttgccaacgtcagtgaggcagatgacagatatatctgtgaccgcttctaccccaatgacttgtgggtggttgtgttccagtttcagcacatcatggttggccttatcctgcctggtattgtcatcctgtcctgctattgcattatcatctccaagctgtcacactccaagggccaccagaagcgcaaggccctcaagaccacaatcatccccatcctggctttcttcgcctgttggctgccttactacattgggatcagcatcgactccttcatcctcctggaaatcatcaagcaagggtgtgagtttgagaacactgtgcacaagtggatttccatcaccgaggccctagctttcttccactgttgtctgaaccccatcctctatgctttccttggagccaaatttaaaacctctgcccagcacgcactcacctctgtgagcagagggtccagcctcaagatcctctccaaaggaaagcgaggtggacattcatctgtttccactgagtctgagtcttcaagttttcactccagctaa

SEQ ID NO: 144 - protein, 352 aa, Homo sapiens [sequence omitted]

SEQ ID NO: 145 - DNA, 31 bp, Unknown
  Primer
ctccaagctttgvccagcgagaaaagcgaag

SEQ ID NO: 146 - DNA, 45 bp, Unknown
  Primer
gcctcctgcagatccaccgcctccggatgtatataaatatatatc

SEQ ID NO: 147 - DNA, 30 bp, Unknown
  Primer
gcctcctgcagatgtatataaatatatatc

SEQ ID NO: 148 - protein, 13 aa, Homo sapiens
SEQKLISEEDLNN

SEQ ID NO: 149 - protein, 66 aa, Homo sapiens
MNAAASGPSNTPPEIAAARAHYNIVTFAAAIYKKSQHMAAAVNIRNCCYIAAASEQKLISEEDLNN

SEQ ID NO: 150 - DNA, 27 bp, Unknown
  Primer
agcttggctgttccgccatggctcgag

SEQ ID NO: 151 - DNA, 36 bp, Unknown
  Primer
ccgaattcaagcttagatgctctagcaaaagccaag

SEQ ID NO: 152 - DNA, 39 bp, Unknown
  Primer
cccctgcagttaggatccctcgagaggtaaaatttcatc

SEQ ID NO: 153 - DNA, 30 bp, Unknown
  Primer
ccgaattctcgaggctcctaaagaaaatac

SEQ ID NO: 154 - DNA, 41 bp, Unknown
  Primer
ccaagcttggatcctgcgcagatcttggtgttggttttttg

SEQ ID NO: 155 - DNA, 21 bp, Unknown
  Primer
aattaccatggaattcctgca

SEQ ID NO: 156 - DNA, 13 bp, Unknown
  Primer
tggtaccttaagg

SEQ ID NO: 157 - DNA, 29 bp, Unknown
  Primer
actctagagttcgatctcccttgcagcag

SEQ ID NO: 158 - DNA, 29 bp, Unknown
  Primer
acagatctgttcgatctcccttgcagcag

SEQ ID NO: 159 - DNA, 25 bp, Unknown
  Primer
ctcggatccctggcacctctaaccc

SEQ ID NO: 160 - DNA, 24 bp, Unknown
  Primer
ggtctagaaccctcaaacaagccc

SEQ ID NO: 161 - DNA, 36 bp, Unknown
  Primer
acatgcatgcactagtgcgcgcgttgacattgatta

SEQ ID NO: 162 - DNA, 36 bp, Unknown
  Primer
acatgcatccatgtgagagctctgcttatatagacc

SEQ ID NO: 163 - protein, 4 aa, Unknown
  Consensus sequence
CVIA

SEQ ID NO: 164 - protein, 6 aa, Unknown
  Conserved domain
  MISC_FEATURE (3)..(3): Xaa can be any amino acid
  MISC_FEATURE (6)..(6): Xaa can be any amino acid
LPXTGX

SEQ ID NO: 165 - protein, 6 aa, Homo sapiens
VTYAQL

SEQ ID NO: 166 - protein, 6 aa, Homo sapiens
IVYELL

What is claimed is:

1. A mammalian cell receptor useful in the treatment of cancer which binds tumor associated lipids wherein said binding induces anergy or apoptosis in said T cells and antigen presenting cells.

2. The tumor associated lipids of claim 1 which are selected from a group consisting of fatty acids, ceramides, glycolipids, sphingolipids, glycosphingolipids, phosphosphingolipids, gangliosides, sialylated glycans, lipopeptides and proteoglycolipids.

3. The mammalian cells of claims 1 and 2 which are selected from a group consisting of T cells, NKT cells, antigen presenting cells, dendritic cells, fibroblasts, macrophages.

4. The cells of claim 1 and 3 which have a conserved sequence tyrosine-based inhibitory motif sequence in their cytoplasmic tails

5. A mammalian cell useful in the treatment of cancer in a mammal wherein the receptor which binds tumor associated lipids and induces cellular inactivation or death is deleted or functionally deactivated.

6. The cells of claim 5 which are selected from a group consisting of T cells, NKT cells, antigen presenting cells, dendritic cells, fibroblasts, macrophages

7. A method for producing a tumoricidal immunocyte population in vivo in a mammal said method comprising allowing tumor associated lipids to contact immunocytes in which receptors for immunosuppressive fatty acids, ceramides, glycolipids, sphingolipids, glycosphingolipids, phosphosphingolipids, gangliosides, sialylated glycans, lipopeptides and proteoglycolipids. are inactivated or deleted.

8. A method for producing a tumoricical immunocyte population ex vivo in a mammal, said method comprising:
a) allowing tumor associated lipids to contact immunocytes in which receptors for said lipids are inactivated or deleted to produce a tumoricidal immunocyte population.
b) administering said tumoricidally activated immunocytes to the host.

9. A method for producing a tumoricical antigen presenting cell population ex vivo in a mammal, said method comprising:
a) allowing a tumor associated lipid to contact antigen presenting cells in which receptors for said tumor associated lipids are inactivated or deleted to produce a tumoricidally activated population.
b) administering said antigen presenting cells to the host.

10. A method for producing a tumoricical T cell population ex vivo in a mammal, said method comprising:
a) allowing a tumor associated lipids to contact T cells in which adaptor proteins which inhibit T cell activation by tumor associated antigens are deleted or functionally deactivated to produce a tumoricidal population of T cells.
b) administering said tumoricidally activated T cells to the host.

11. A method of treating cancer in a mammal by administration of a lipid binding molecule which binds immunosuppressive tumor associated lipids in vivo.

12. A method of treating cancer in a mammal wherein the lipid binding molecules are administered to the host 1-4 hours before the administration of tumoricidally activated cells of claims 5 and 6.

13. The lipid binding protein of claim 11 which is selected from a group consisting of sialic acic binding lectin (Siglecs), prosaposin, saposins and glycolipid transfer protein (GLTP).

14. A construct useful in the treatment of cancer comprising a superantigen nucleotide inserted into a virus.

15. The virus claim 14 wherein said virus contains a tissue specific promoter

16. The virus of claim 15 wherein the tissue specific promoter is selected from a group consisting of prostate specific promoter, albumin specific promoter, myeloma immunogloulin specific promoter, alpha fetoprotein promoter.

17. The virus of claim 14 wherein said virus is deleted of a tumor suppressor inactivating gene.

18. The virus of claim 17 wherein said tumor specific promoter is an adenoviral mutant (dl1150) which lacks expression of the E1B-55-kDA protein.

19. The virus of claim 14 wherein the virus encodes an immunogenic cell surface protein

20. The virus of claim 19 wherein the cell surface protein is HSV-E6 or E7.

21. The virus of claim 14 wherein said virus contains a prodrug enzyme.

22. The virus of claim 21 wherein said virus contains a herpes simplex virus thymidine kinase gene

23. The virus of claim 14 wherein said virus contains a self replicating RNA sequence.

24. The virus of claim 23 wherein said virus is an Alphavirus producing tumor encoding tumor specific antigens, superantigens and lipid binding agents.

25. A mammalian T cell useful in the treatment of cancer wherein an adaptor protein which inhibits T cell activation by tumor associated antigens is deleted or functionally deactivated.

26. A method for producing a tumoricidal T cell population in vivo in a mammal said method comprising allowing a tumor associated antigen and to contact immunocytes in which adaptor proteins which inhibit T cell activation by tumor associated antigens are deleted or functionally deactivated.

27. A composition useful in the treatment of cancer comprising a lipid raft conjugated to a superantigen.

28. The composition of claim 27 wherein said lipid raft comprises signal transduction molecules, G proteins, cell surface receptors, tumor associated antigens.

29. A method for producing a tumoricical T cell population ex vivo in a mammal, said method comprising: said method comprising allowing a superantigen-lipid raft conjugate to contact immunocytes in vivo

30. A method for producing a tumoricical T cell population ex vivo in a mammal, said method comprising:
a) allowing a superantigen-lipid raft to contact T cells ex vivo
b) administering said tumoricidally activated T cells to the host.
